(19) United States
(12) Patent Application Publication
(10) Pub. No.: US 2025/0009904 A1
(43) Pub. Date: Jan. 9, 2025

(54) RNA-Editing Compositions and Methods of Use

(71) Applicant: Shape Therapeutics Inc., Seattle, WA (US)

(72) Inventors: Yiannis SAVVA, Seattle, WA (US); Jason Thaddeus DEAN, Seattle, WA (US); Brian John BOOTH, West Roxbury, MA (US); Richard Thomas SULLIVAN, Seattle, WA (US); Adrian Wrangham BRIGGS, Seattle, WA (US); Lina Rajili BAGEPALLI, Cambridge, MA (US); Yazmin Ines ROVIRA GONZALEZ, Seattle, WA (US); Lan GUO, Seattle, WA (US)

(21) Appl. No.: 18/641,539

(22) Filed: Apr. 22, 2024

Related U.S. Application Data
(63) Continuation of application No. PCT/US2022/078740, filed on Oct. 26, 2022.
(60) Provisional application No. 63/271,889, filed on Oct. 26, 2021.
(60) Provisional application No. 63/277,707, filed on Nov. 10, 2021.
(60) Provisional application No. 63/284,737, filed on Dec. 1, 2021.
(60) Provisional application No. 63/296,955, filed on Jan. 6, 2022.
(60) Provisional application No. 63/303,659, filed on Jan. 27, 2022.
(60) Provisional application No. 63/306,809, filed on Feb. 4, 2022.
(60) Provisional application No. 63/327,380, filed on Apr. 5, 2022.
(60) Provisional application No. 63/345,069, filed on May 24, 2022.

(51) Int. Cl. A61K 48/00; C12N 9/78; C12N 15/11

(52) U.S. Cl. CPC A61K 48/005; C12N 9/78; C12N 15/111; C12N 2310/20; C12N 2310/531; C12N 2310/533; C12Y 305/04004

(57) ABSTRACT

Provided herein are engineered guides configured, upon hybridization to target RNA molecules, to form double stranded RNA substrates comprising (i) a region comprising at least one structural feature; and (ii) a first internal loop and a second internal loop, wherein the double stranded RNA substrates recruit RNA editing entities and facilitate chemical modifications of base nucleotides in the target RNA molecules. Also provided herein are compositions, vectors, and cells comprising the engineered guides disclosed herein. Also provided herein are methods of introducing the engineered guides described herein into cells and methods of treating a disease or condition in a subject in need thereof comprising administering to the subject the engineered guides, polynucleotides encoding the engineered guides, delivery vehicles comprising such engineered guides or such polynucleotides, or pharmaceutical compositions comprising any one of these as described herein.

### CROSS REFERENCE

[0001] This application is a continuation of PCT/US2022/078740, filed Oct. 26, 2022, which claims priority under 35 U.S.C. § 119 from Provisional Application Ser. No. 63/271,889, filed Oct. 26, 2021, Provisional Application Ser. No. 63/277,707, filed Nov. 10, 2021, Provisional Application Ser. No. 63/284,737, filed Dec. 1, 2021, Provisional Application Ser. No. 63/296,955, filed Jan. 6, 2022, Provisional Application Ser. No. 63/303,659, filed Jan. 27, 2022, Provisional Application Ser. No. 63/306,809, filed Feb. 4, 2022, Provisional Application Ser. No. 63/327,380, filed Apr. 5, 2022, and Provisional Application Ser. No. 63/345,069, filed May 24, 2022, the disclosures of which are incorporated herein by reference in their entirety.

### SEQUENCE LISTING

[0002] The instant application contains a Sequence Listing which has been submitted electronically in ST.26 (xml) format and is hereby incorporated by reference in its entirety. Said ST.26 (xml) copy, created on Apr. 15, 2024, is named 199235_743301_xml and is 1,576,960 bytes in size.

### SUMMARY

[0003] Disclosed herein is an engineered guide RNA or a polynucleotide sequence encoding the engineered guide RNA, wherein upon hybridization of the engineered guide RNA to a sequence of a target RNA, the engineered guide RNA and the sequence of the target RNA form a guide-target RNA scaffold, wherein the guide-target RNA scaffold comprises: (i) a region that comprises at least one structural feature selected from the group consisting of: a bulge, a wobble base pair, an internal loop, a mismatch, a hairpin, and any combination thereof, wherein, upon contacting the guide-target RNA scaffold with an RNA editing entity, the RNA editing entity edits an on-target adenosine in the target RNA within the guide-target RNA scaffold; and (ii) a first internal loop and a second internal loop that flank opposing ends of the region of the guide-target RNA scaffold of (i), wherein the first internal loop is 5′ of the region that comprises the at least one structural feature and the second internal loop is a 3′ of the region that comprises the at least one structural feature, and wherein the first internal loop and the second internal loop facilitate an increase in the amount of the editing of the on-target adenosine in the target RNA, relative to an otherwise comparable engineered guide RNA lacking the first internal loop and the second internal loop. In some embodiments, the first internal loop and the second internal loop facilitate a decrease in the amount of off-target adenosine editing in the target RNA, relative to an otherwise comparable engineered guide RNA lacking the first internal loop and the second internal loop. In some embodiments, the first internal loop is a symmetric internal loop and the second internal loop is a symmetric internal loop. In some embodiments, the first internal loop and the second internal loop are symmetric internal loops that independently are 5/5, 6/6, 7/7, 8/8, 9/9, 10/10, 11/11, 12/12, 13/13, 14/14, 15/15, 16/16, 17/17, 18/18, 19/19, or 20/20 symmetric internal loops, wherein the first number is the number of nucleotides contributed to the symmetric internal loop from the engineered guide RNA side of the guide-target RNA scaffold and the second number is the number of nucleotides contributed to the symmetric internal loop from the target RNA side of the guide-target RNA scaffold. In some embodiments, the first internal loop is an asymmetric internal loop and the second internal loop is an asymmetric internal loop. In some embodiments, the first internal loop and the second internal loop are asymmetric internal loops that independently are 5/6, 5/7, 5/8, 5/9, 5/10, 5/11, 5/12, 5/13, 5/14, 5/15, 5/16, 5/17, 5/18, 5/19, 5/20, 6/5, 6/7, 6/8, 6/9, 6/10, 6/11, 6/12, 6/13, 6/14, 6/15, 6/16, 6/17, 6/18, 6/19, 6/20, 7/5, 7/6, 7/8, 7/9, 7/10, 7/11, 7/12, 7/13, 7/14, 7/15, 7/16, 7/17, 7/18, 7/19, 7/20, 8/5, 8/6, 8/7, 8/9, 8/10, 8/11, 8/12, 8/13, 8/14, 8/15, 8/16, 8/17, 8/18, 8/19, 8/20, 9/5, 9/6, 9/7, 9/8, 9/10, 9/11, 9/12, 9/13, 9/14, 9/15, 9/16, 9/17, 9/18, 9/19, 9/20, 10/5, 10/6, 10/7, 10/8, 10/9, 10/11, 10/12, 10/13, 10/14, 10/15, 10/16, 10/17, 10/18, 10/19, 10/20, 11/5, 11/6, 11/7, 11/8, 11/9, 11/10, 11/12, 11/13, 11/14, 11/15, 11/16, 11/17, 11/18, 11/19, 11/20, 12/5, 12/6, 12/7, 12/8, 12/9, 12/10, 12/11, 12/13, 12/14, 12/15, 12/16, 12/17, 12/18, 12/19, 12/20, 13/5, 13/6, 13/7, 13/8, 13/9, 13/10, 13/11, 13/12, 13/14, 13/15, 13/16, 13/17, 13/18, 13/19, 13/20, 14/5, 14/6, 14/7, 14/8, 14/9, 14/10, 14/11, 14/12, 14/13, 14/15, 14/16, 14/17, 14/18, 14/19, 14/20, 15/5, 15/6, 15/7, 15/8, 15/9, 15/10, 15/11, 15/12, 15/13, 15/14, 15/16, 15/17, 15/18, 15/19, 15/20, 16/5, 16/6, 16/7, 16/8, 16/9, 16/10, 16/11, 16/12, 16/13, 16/14, 16/15, 16/17, 16/18, 16/19, 16/20, 17/5, 17/6, 17/7, 17/8, 17/9, 17/10, 17/11, 17/12, 17/13, 17/14, 17/15, 17/16, 17/18, 17/19, 17/20, 18/5, 18/6, 18/7, 18/8, 18/9, 18/10, 18/11, 18/12, 18/13, 18/14, 18/15, 18/16, 18/17, 18/19, 18/20, 19/5, 19/6, 19/7, 19/8, 19/9, 19/10, 19/11, 19/12, 19/13, 19/14, 19/15, 19/16, 19/17, 19/18, 19/20, 20/5, 20/6, 20/7, 20/8, 20/9, 20/10, 20/11, 20/12, 20/13, 20/14, 20/15, 20/16, 20/17, 20/18, or 20/19 asymmetric internal loops, wherein the first number is the number of nucleotides contributed to the asymmetric internal loop from the engineered guide RNA side of the guide-target RNA scaffold and the second number is the number of nucleotides contributed to the asymmetric internal loop from the target RNA side of the guide-target RNA scaffold. In some embodiments, the first internal loop is a symmetric internal loop and the second internal loop is an asymmetric internal loop. In some embodiments, the first internal loop is a symmetric internal loop that is a 5/5, 6/6, 7/7, 8/8, 9/9, 10/10, 11/11, 12/12, 13/13, 14/14, 15/15, 16/16, 17/17, 18/18, 19/19, or 20/20 symmetric internal loop; and wherein the second internal loop is an asymmetric internal loop that is a 5/6, 5/7, 5/8, 5/9, 5/10, 5/11, 5/12, 5/13, 5/14, 5/15, 5/16, 5/17, 5/18, 5/19, 5/20, 6/5, 6/7, 6/8, 6/9, 6/10, 6/11, 6/12, 6/13, 6/14, 6/15, 6/16, 6/17, 6/18, 6/19, 6/20, 7/5, 7/6, 7/8, 7/9, 7/10, 7/11, 7/12, 7/13, 7/14, 7/15, 7/16, 7/17, 7/18, 7/19, 7/20, 8/5, 8/6, 8/7, 8/9, 8/10, 8/11, 8/12, 8/13, 8/14, 8/15, 8/16, 8/17, 8/18, 8/19, 8/20, 9/5, 9/6, 9/7, 9/8, 9/10, 9/11, 9/12, 9/13, 9/14, 9/15, 9/16, 9/17, 9/18, 9/19, 9/20, 10/5, 10/6, 10/7, 10/8, 10/9, 10/11, 10/12, 10/13, 10/14, 10/15, 10/16, 10/17, 10/18, 10/19, 10/20, 11/5, 11/6, 11/7, 11/8, 11/9, 11/10, 11/12, 11/13, 11/14, 11/15, 11/16, 11/17, 11/18, 11/19, 11/20, 12/5, 12/6, 12/7, 12/8, 12/9, 12/10, 12/11, 12/13, 12/14, 12/15, 12/16, 12/17, 12/18, 12/19, 12/20, 13/5, 13/6, 13/7, 13/8, 13/9, 13/10, 13/11, 13/12, 13/14, 13/15, 13/16, 13/17, 13/18, 13/19, 13/20, 14/5, 14/6, 14/7, 14/8, 14/9, 14/10, 14/11, 14/12, 14/13, 14/15, 14/16, 14/17, 14/18, 14/19, 14/20, 15/5, 15/6, 15/7, 15/8, 15/9, 15/10, 15/11, 15/12, 15/13, 15/14, 15/16, 15/17, 15/18, 15/19, 15/20, 16/5, 16/6, 16/7, 16/8, 16/9, 16/10, 16/11, 16/12, 16/13, 16/14, 16/15, 16/17, 16/18, 16/19, 16/20, 17/5, 17/6, 17/7, 17/8, 17/9, 17/10, 17/11, 17/12, 17/13, 17/14, 17/15, 17/16, 17/18, 17/19, 17/20, 18/5, 18/6, 18/7, 18/8, 18/9, 18/10, 18/11, 18/12, 18/13, 18/14, 18/15, 18/16, 18/17, 18/19, 18/20, 19/5, 19/6, 19/7, 19/8, 19/9, 19/10, 19/11, 19/12, 19/13, 19/14, 19/15, 19/16, 19/17, 19/18, 19/20, 20/5, 20/6, 20/7, 20/8, 20/9, 20/10, 20/11, 20/12, 20/13, 20/14, 20/15, 20/16, 20/17, 20/18, or 20/19 asymmetric internal loop, wherein the first number is the number of nucleotides contributed to the symmetric internal loop or the asymmetric internal loop from the engineered guide RNA side of the guide-target RNA scaffold and the second number is the number of nucleotides contributed to the symmetric internal loop or the asymmetric internal loop from the target RNA side of the guide-target RNA scaffold. In some embodiments, the first internal loop is an asymmetric internal loop and the second internal loop is a symmetric internal loop. In some embodiments, the first internal loop is an asymmetric internal loop that is a 5/6, 5/7, 5/8, 5/9, 5/10, 5/11, 5/12, 5/13, 5/14, 5/15, 5/16, 5/17, 5/18, 5/19, 5/20, 6/5, 6/7, 6/8, 6/9, 6/10, 6/11, 6/12, 6/13, 6/14, 6/15, 6/16, 6/17, 6/18, 6/19, 6/20, 7/5, 7/6, 7/8, 7/9, 7/10, 7/11, 7/12, 7/13, 7/14, 7/15, 7/16, 7/17, 7/18, 7/19, 7/20, 8/5, 8/6, 8/7, 8/9, 8/10, 8/11, 8/12, 8/13, 8/14, 8/15, 8/16, 8/17, 8/18, 8/19, 8/20, 9/5, 9/6, 9/7, 9/8, 9/10, 9/11, 9/12, 9/13, 9/14, 9/15, 9/16, 9/17, 9/18, 9/19, 9/20, 10/5, 10/6, 10/7, 10/8, 10/9, 10/11, 10/12, 10/13, 10/14, 10/15, 10/16, 10/17, 10/18, 10/19, 10/20, 11/5, 11/6, 11/7, 11/8, 11/9, 11/10, 11/12, 11/13, 11/14, 11/15, 11/16, 11/17, 11/18, 11/19, 11/20, 12/5, 12/6, 12/7, 12/8, 12/9, 12/10, 12/11, 12/13, 12/14, 12/15, 12/16, 12/17, 12/18, 12/19, 12/20, 13/5, 13/6, 13/7, 13/8, 13/9, 13/10, 13/11, 13/12, 13/14, 13/15, 13/16, 13/17, 13/18, 13/19, 13/20, 14/5, 14/6, 14/7, 14/8, 14/9, 14/10, 14/11, 14/12, 14/13, 14/15, 14/16, 14/17, 14/18, 14/19, 14/20, 15/5, 15/6, 15/7, 15/8, 15/9, 15/10, 15/11, 15/12, 15/13, 15/14, 15/16, 15/17, 15/18, 15/19, 15/20, 16/5, 16/6, 16/7, 16/8, 16/9, 16/10, 16/11, 16/12, 16/13, 16/14, 16/15, 16/17, 16/18, 16/19, 16/20, 17/5, 17/6, 17/7, 17/8, 17/9, 17/10, 17/11, 17/12, 17/13, 17/14, 17/15, 17/16, 17/18, 17/19, 17/20, 18/5, 18/6, 18/7, 18/8, 18/9, 18/10, 18/11, 18/12, 18/13, 18/14, 18/15, 18/16, 18/17, 18/19, 18/20, 19/5, 19/6, 19/7, 19/8, 19/9, 19/10, 19/11, 19/12, 19/13, 19/14, 19/15, 19/16, 19/17, 19/18, 19/20, 20/5, 20/6, 20/7, 20/8, 20/9, 20/10, 20/11, 20/12, 20/13, 20/14, 20/15, 20/16, 20/17, 20/18, or 20/19 asymmetric internal loop; and wherein the second internal loop is a symmetric internal loop that is a 5/5, 6/6, 7/7, 8/8, 9/9, 10/10, 11/11, 12/12, 13/13, 14/14, 15/15, 16/16, 17/17, 18/18, 19/19, or 20/20 symmetric internal loop, wherein the first number is the number of nucleotides contributed to the symmetric internal loop or the asymmetric internal loop from the engineered guide RNA side of the guide-target RNA scaffold and the second number is the number of nucleotides contributed to the symmetric internal loop or the asymmetric internal loop from the target RNA side of the guide-target RNA scaffold. In some embodiments, the first internal loop and the second internal loop comprise the same number of bases. In some embodiments, the first internal loop and the second internal loop comprise a different number of bases. In some embodiments, the first internal loop comprises a greater number of bases than the second internal loop. In some embodiments, the second internal loop comprises a greater number of bases than the first internal loop. In some embodiments, the first internal loop and the second internal loop independently comprise at least about 5 bases to at least about 20 bases of the engineered guide RNA and at least about 5 bases to at least about 20 bases of the target RNA. In some embodiments, the engineered guide RNA comprises a cytosine that, when the engineered guide RNA is hybridized to the target RNA, is present in the guide-target RNA scaffold opposite the on-target adenosine that is edited by the RNA editing entity, thereby forming an A/C mismatch in the guide-target RNA scaffold. In some embodiments, the first internal loop and the second internal loop are positioned the same number of bases from the A/C mismatch with respect to the base of the first internal loop and the base of the second internal loop that is most proximal to the A/C mismatch. In some embodiments, the first internal loop is positioned at least about 5 bases away from the A/C mismatch with respect to the base of the first internal loop that is most proximal to the A/C mismatch. In some embodiments, the first internal loop is positioned from about 1 bases away from the A/C mismatch to about 30 bases away from the A/C mismatch with respect to the base of the first internal loop that is most proximal to the A/C mismatch; optionally wherein the first internal loop is positioned 6 bases, 10 bases, 12 bases, or 15 bases away from the A/C mismatch with respect to the base of the first internal loop that is most proximal to the A/C mismatch. In some embodiments, the second internal loop is positioned at least about 12 bases away from the A/C mismatch with respect to the base of the second internal loop that is most proximal to the A/C mismatch. In some embodiments, the second internal loop is positioned from about 12 bases away from the A/C mismatch to about 40 bases away from the A/C mismatch with respect to the base of the second internal loop that is most proximal to the A/C mismatch; optionally wherein the second internal loop is positioned 24 bases, 30 bases, 33 bases, or 34 bases away from the A/C mismatch with respect to the base of the second internal loop that is most proximal to the A/C mismatch. In some embodiments, the target RNA is an mRNA selected from the group consisting of: ABCA4, APP, CFTR, DMPK, DUX4, GAPDH, GBA, GRN, HEXA, LIPA, LRRK2, MAPT, PINK1, PMP22, SERPINA1, SNCA, or SOD1, a fragment of any one of these, and any combination thereof. In some embodiments, the target RNA is ABCA4, and wherein the ABCA4 comprises a target mutation for RNA editing selected from the group consisting of: G6320A; G5714A; G5882A; and any combination thereof. In some embodiments, the first internal loop is positioned from about 5 bases away from the A/C mismatch to about 15 bases away from the A/C mismatch with respect to the base of the first internal loop that is most proximal to the A/C mismatch. In some embodiments, the first internal loop is positioned 15 bases away from the A/C mismatch with respect to the base of the first internal loop that is most proximal to the A/C mismatch. In some embodiments, the second internal loop is positioned from about 12 bases away from the A/C mismatch to about 40 bases away from the A/C mismatch with respect to the base of the second internal loop that is most proximal to the A/C mismatch. In some embodiments, the second internal loop is positioned 33 bases away from the A/C mismatch with respect to the base of the second internal loop that is most proximal to the A/C mismatch. In some embodiments, the engineered guide RNA comprises a polynucleotide sequence with at least 80%, 85%, 90%, 92%, 95%, 97%, or 99% sequence identity to any one of SEQ ID NO: 1-105, 2729-2761, or 2772-2843. In some embodiments, the target RNA is APP, and wherein a target mutation is introduced into the APP RNA, wherein a polypeptide encoded by the APP RNA after modification comprises a polypeptide mutation selected from the group consisting of: K670E, K670R, K670G, M671V, A673V, A673T, D672G, E682G, H684R, K687R, K687E, K687G, I712X, T714X, and any combination thereof. In some embodiments, the first internal loop is positioned from about 5 bases away from the A/C mismatch to about 20 bases away from the A/C mismatch with respect to the base of the first internal loop that is most proximal to the A/C mismatch. In some embodiments, the first internal loop is positioned 10 bases away from the A/C mismatch with respect to the base of the first internal loop that is most proximal to the A/C mismatch. In some embodiments, the second internal loop is positioned from about 15 bases away from the A/C mismatch to about 40 bases away from the A/C mismatch with respect to the base of the second internal loop that is most proximal to the A/C mismatch. In some embodiments, the second internal loop is positioned 33 bases away from the A/C mismatch with respect to the base of the second internal loop that is most proximal to the A/C mismatch. In some embodiments, the engineered guide RNA comprises a polynucleotide sequence with at least 80%, 85%, 90%, 92%, 95%, 97%, or 99% sequence identity to any one of SEQ ID NO: 112-114. In some embodiments, the target RNA is SERPINA1, and wherein the SERPINA encodes a polypeptide that comprises an E342K mutation. In some embodiments, the first internal loop is positioned from about 5 bases away from the A/C mismatch to about 20 bases away from the A/C mismatch with respect to the base of the first internal loop that is most proximal to the A/C mismatch. In some embodiments, the first internal loop is positioned 12 bases away from the A/C mismatch with respect to the base of the first internal loop that is most proximal to the A/C mismatch. In some embodiments, the second internal loop is positioned from about 12 bases away from the A/C mismatch to about 40 bases away from the A/C mismatch with respect to the base of the second internal loop that is most proximal to the A/C mismatch. In some embodiments, the second internal loop is positioned 24 bases away from the A/C mismatch with respect to the base of the second internal loop that is most proximal to the A/C mismatch. In some embodiments, the engineered guide RNA comprises a polynucleotide sequence with at least 80%, 85%, 90%, 92%, 95%, 97%, or 99% sequence identity to any one of SEQ ID NO: 2762-2768 or 3083-3086. In some embodiments, the target RNA is LRRK2, and wherein the LRRK2 encodes a polypeptide with a polypeptide mutation selected from the group consisting of: E10L, A30P, S52F, E46K, A53T, L119P, A211V, C228S, E334K, N363S, V366M, A419V, R506Q, N544E, N551K, A716V, M712V, I723V, P755L, R793M, I810V, K871E, Q923H, Q930R, R1067Q, S1096C, Q1111H, 11122V, A1151T, L1165P, 11192V, H1216R, S1228T, P1262A, R1325Q, I1371V, R1398H, T1410M, D1420N, R1441G, R1441H, A1442P, P1446L, V1450I, K1468E, R1483Q, R1514Q, P1542S, V1613A, R1628P, M1646T, S1647T, Y1699C, R1728H, R1728L, L1795F, M1869V, M1869T, L1870F, E1874X, R1941H, Y2006H, I2012T, G2019S, I2020T, T2031S, N2081D, T2141M, R2143H, Y2189C, T2356I, G2385R, V2390M, E2395K, M2397T, L2466H, Q2490NfsX3, and any combination thereof. In some embodiments, the first internal loop is positioned from about 7 bases away from the A/C mismatch to about 30 bases away from the A/C mismatch with respect to the base of the first internal loop that is most proximal to the A/C mismatch. In some embodiments, the first internal loop is positioned 10 bases away from the A/C mismatch with respect to the base of the first internal loop that is most proximal to the A/C mismatch. In some embodiments, the second internal loop is positioned from about 18 bases away from the A/C mismatch to about 34 bases away from the A/C mismatch with respect to the base of the second internal loop that is most proximal to the A/C mismatch. In some embodiments, the second internal loop is positioned 34 bases away from the A/C mismatch with respect to the base of the second internal loop that is most proximal to the A/C mismatch. In some embodiments, the engineered guide RNA comprises a polynucleotide sequence with at least 80%, 85%, 90%, 92%, 95%, 97%, or 99% sequence identity to any one of SEQ ID NO: 118-167, 2686-2728, 2769-2771, 2844-3078, or 3081-3082. In some embodiments, the target RNA is SNCA, and wherein the SNCA comprises a target mutation for RNA editing selected from the group consisting of: translation initiation site (TIS) ATG to GTG in Codon 1 and Codon 5; AUG at position 265 in Exon 2. In some embodiments, the first internal loop is positioned from about 6 bases away from the A/C mismatch to about 20 bases away from the A/C mismatch with respect to the base of the first internal loop that is most proximal to the A/C mismatch. In some embodiments, the first internal loop is positioned 6 bases away from the A/C mismatch with respect to the base of the first internal loop that is most proximal to the A/C mismatch. In some embodiments, the second internal loop is positioned from about 15 bases away from the A/C mismatch to about 38 bases away from the A/C mismatch with respect to the base of the second internal loop that is most proximal to the A/C mismatch. In some embodiments, the second internal loop is positioned 34 bases away from the A/C mismatch with respect to the base of the second internal loop that is most proximal to the A/C mismatch. In some embodiments, the engineered guide RNA comprises a polynucleotide sequence with at least 80%, 85%, 90%, 92%, 95%, 97%, or 99% sequence identity to any one of SEQ ID NO: 2480-2681. In some embodiments, the target RNA is MAPT, and wherein the MAPT comprises a target mutation for RNA editing at the translation initiation site (TIS). In some embodiments, the first internal loop is positioned from about 5 bases away from the A/C mismatch to about 15 bases away from the A/C mismatch with respect to the base of the first internal loop that is most proximal to the A/C mismatch. In some embodiments, the first internal loop is positioned 15 bases away from the A/C mismatch with respect to the base of the first internal loop that is most proximal to the A/C mismatch. In some embodiments, the second internal loop is positioned from about 12 bases away from the A/C mismatch to about 40 bases away from the A/C mismatch with respect to the base of the second internal loop that is most proximal to the A/C mismatch. In some embodiments, the second internal loop is positioned 33 bases away from the A/C mismatch with respect to the base of the second internal loop that is most proximal to the A/C mismatch. In some embodiments, the engineered guide RNA comprises a polynucleotide sequence with at least 80%, 85%, 90%, 92%, 95%, 97%, or 99% sequence identity to any one of SEQ ID NO: 115-117, 1519-2479 or 2682-2685. In some embodiments, the target RNA is DUX4. In some embodiments, the first internal loop is positioned from about 1 base away from the A/C mismatch to about 20 bases away from the A/C mismatch with respect to the base of the first internal loop that is most proximal to the A/C mismatch. In some embodiments, the first internal loop is positioned 6 bases away from the A/C mismatch with respect to the base of the first internal loop that is most proximal to the A/C mismatch. In some embodiments, the second internal loop is positioned from about 15 bases away from the A/C mismatch to about 40 bases away from the A/C mismatch with respect to the base of the second internal loop that is most proximal to the A/C mismatch. In some embodiments, the second internal loop is positioned 33 bases away from the A/C mismatch with respect to the base of the second internal loop that is most proximal to the A/C mismatch. In some embodiments, the engineered guide RNA comprises a polynucleotide sequence with at least 80%, 85%, 90%, 92%, 95%, 97%, or 99% sequence identity to any one of SEQ ID NO: 172-1518. In some embodiments, the target RNA is GRN. In some embodiments, the first internal loop is positioned from about 5 bases away from the A/C mismatch to about 20 bases away from the A/C mismatch with respect to the base of the first internal loop that is most proximal to the A/C mismatch. In some embodiments, the first internal loop is positioned 12 bases away from the A/C mismatch with respect to the base of the first internal loop that is most proximal to the A/C mismatch. In some embodiments, the second internal loop is positioned from about 18 bases away from the A/C mismatch to about 38 bases away from the A/C mismatch with respect to the base of the second internal loop that is most proximal to the A/C mismatch. In some embodiments, the second internal loop is positioned 34 bases away from the A/C mismatch with respect to the base of the second internal loop that is most proximal to the A/C mismatch. In some embodiments, the engineered guide RNA comprises a length of at least about 60 bases. In some embodiments, the engineered guide RNA comprises a length of about 65 bases to about 150 bases. In some embodiments, the at least one structural feature comprises a bulge. In some embodiments, the bulge comprises an asymmetric bulge. In some embodiments, the bulge comprises a symmetric bulge. In some embodiments, the bulge independently comprises about 1 base to about 4 bases of the engineered guide RNA and about 0 bases to about 4 bases of the target RNA. In some embodiments, the at least one structural feature comprises an internal loop. In some embodiments, the internal loop comprises an asymmetric internal loop. In some embodiments, the internal loop comprises a symmetric internal loop. In some embodiments, the internal loop independently comprises about 5 to about 10 bases of either the engineered guide RNA or the target RNA. In some embodiments, the at least one structural feature comprises a hairpin. In some embodiments, the hairpin comprises a length of about 3 bases to about 15 bases in length. In some embodiments, the RNA editing entity is endogenous to a mammalian cell. In some embodiments, the RNA editing entity is an adenosine deaminase acting on RNA (ADAR) enzyme, a catalytically active fragment thereof, or a fusion polypeptide thereof. In some embodiments, the RNA editing entity is the ADAR enzyme. In some embodiments, the ADAR enzyme comprises human ADAR (hADAR). In some embodiments, the ADAR enzyme comprises ADAR1 or ADAR2. In some embodiments, the target RNA is an mRNA or pre-mRNA. In some embodiments, the engineered guide RNA further comprises at least one chemical modification. In some embodiments, the at least one chemical modification comprises a 2′-O-methyl group on a ribose sugar of a nucleotide of the engineered guide RNA. In some embodiments, the at least one chemical modification comprises a phosphothioate modification of a backbone of the engineered guide RNA. In some embodiments, the engineered guide comprises a total polynucleotide length of at least about 65 bases. In some embodiments, the engineered guide comprises a total polynucleotide length range of about 65 bases to about 100 bases. In some embodiments, the engineered guide RNA is a circular guide RNA.

[0004] Also disclosed herein is an engineered guide RNA or a polynucleotide sequence encoding the engineered guide RNA, wherein upon hybridization, the engineered guide RNA and the sequence of the target RNA form a guide-target RNA scaffold, wherein the guide-target RNA scaffold comprises: (i) a micro-footprint that comprises at least one structural feature selected from the group consisting of: a bulge, an internal loop, a mismatch, a wobble base pair, a hairpin, and any combination thereof, wherein, upon contacting the guide-target RNA scaffold with an RNA editing entity, the RNA editing entity edits an on-target adenosine in the target RNA within the guide-target RNA scaffold; and (ii) a barbell macro-footprint that comprises a first internal loop that is 5′ of the micro-footprint and a second internal loop that is 3′ of the micro-footprint, wherein the barbell macro-footprint facilitates an increase in the amount of the editing of the on-target adenosine in the target RNA, relative to an otherwise comparable engineered guide RNA lacking the barbell macro-footprint. In some embodiments, the first internal loop and the second internal loop facilitate a decrease in the amount of off-target adenosine editing in the target RNA, relative to an otherwise comparable engineered guide RNA lacking the first internal loop and the second internal loop. In some embodiments, the first internal loop is a symmetric internal loop and the second internal loop is a symmetric internal loop. In some embodiments, the first internal loop and the second internal loop are symmetric internal loops that independently are 5/5, 6/6, 7/7, 8/8, 9/9, 10/10, 11/11, 12/12, 13/13, 14/14, 15/15, 16/16, 17/17, 18/18, 19/19, or 20/20 symmetric internal loops, wherein the first number is the number of nucleotides contributed to the symmetric internal loop from the engineered guide RNA side of the guide-target RNA scaffold and the second number is the number of nucleotides contributed to the symmetric internal loop from the target RNA side of the guide-target RNA scaffold. In some embodiments, the first internal loop is an asymmetric internal loop and the second internal loop is an asymmetric internal loop. In some embodiments, the first internal loop and the second internal loop are asymmetric internal loops that independently are 5/6, 5/7, 5/8, 5/9, 5/10, 5/11, 5/12, 5/13, 5/14, 5/15, 5/16, 5/17, 5/18, 5/19, 5/20, 6/5, 6/7, 6/8, 6/9, 6/10, 6/11, 6/12, 6/13, 6/14, 6/15, 6/16, 6/17, 6/18, 6/19, 6/20, 7/5, 7/6, 7/8, 7/9, 7/10, 7/11, 7/12, 7/13, 7/14, 7/15, 7/16, 7/17, 7/18, 7/19, 7/20, 8/5, 8/6, 8/7, 8/9, 8/10, 8/11, 8/12, 8/13, 8/14, 8/15, 8/16, 8/17, 8/18, 8/19, 8/20, 9/5, 9/6, 9/7, 9/8, 9/10, 9/11, 9/12, 9/13, 9/14, 9/15, 9/16, 9/17, 9/18, 9/19, 9/20, 10/5, 10/6, 10/7, 10/8, 10/9, 10/11, 10/12, 10/13, 10/14, 10/15, 10/16, 10/17, 10/18, 10/19, 10/20, 11/5, 11/6, 11/7, 11/8, 11/9, 11/10, 11/12, 11/13, 11/14, 11/15, 11/16, 11/17, 11/18, 11/19, 11/20, 12/5, 12/6, 12/7, 12/8, 12/9, 12/10, 12/11, 12/13, 12/14, 12/15, 12/16, 12/17, 12/18, 12/19, 12/20, 13/5, 13/6, 13/7, 13/8, 13/9, 13/10, 13/11, 13/12, 13/14, 13/15, 13/16, 13/17, 13/18, 13/19, 13/20, 14/5, 14/6, 14/7, 14/8, 14/9, 14/10, 14/11, 14/12, 14/13, 14/15, 14/16, 14/17, 14/18, 14/19, 14/20, 15/5, 15/6, 15/7, 15/8, 15/9, 15/10, 15/11, 15/12, 15/13, 15/14, 15/16, 15/17, 15/18, 15/19, 15/20, 16/5, 16/6, 16/7, 16/8, 16/9, 16/10, 16/11, 16/12, 16/13, 16/14, 16/15, 16/17, 16/18, 16/19, 16/20, 17/5, 17/6, 17/7, 17/8, 17/9, 17/10, 17/11, 17/12, 17/13, 17/14, 17/15, 17/16, 17/18, 17/19, 17/20, 18/5, 18/6, 18/7, 18/8, 18/9, 18/10, 18/11, 18/12, 18/13, 18/14, 18/15, 18/16, 18/17, 18/19, 18/20, 19/5, 19/6, 19/7, 19/8, 19/9, 19/10, 19/11, 19/12, 19/13, 19/14, 19/15, 19/16, 19/17, 19/18, 19/20, 20/5, 20/6, 20/7, 20/8, 20/9, 20/10, 20/11, 20/12, 20/13, 20/14, 20/15, 20/16, 20/17, 20/18, or 20/19 asymmetric internal loops, wherein the first number is the number of nucleotides contributed to the asymmetric internal loop from the engineered guide RNA side of the guide-target RNA scaffold and the second number is the number of nucleotides contributed to the asymmetric internal loop from the target RNA side of the guide-target RNA scaffold. In some embodiments, the first internal loop is a symmetric internal loop and the second internal loop is an asymmetric internal loop. In some embodiments, the first internal loop is a symmetric internal loop that is a 5/5, 6/6, 7/7, 8/8, 9/9, 10/10, 11/11, 12/12, 13/13, 14/14, 15/15, 16/16, 17/17, 18/18, 19/19, or 20/20 symmetric internal loop; and wherein the second internal loop is an asymmetric internal loop that is a 5/6, 5/7, 5/8, 5/9, 5/10, 5/11, 5/12, 5/13, 5/14, 5/15, 5/16, 5/17, 5/18, 5/19, 5/20, 6/5, 6/7, 6/8, 6/9, 6/10, 6/11, 6/12, 6/13, 6/14, 6/15, 6/16, 6/17, 6/18, 6/19, 6/20, 7/5, 7/6, 7/8, 7/9, 7/10, 7/11, 7/12, 7/13, 7/14, 7/15, 7/16, 7/17, 7/18, 7/19, 7/20, 8/5, 8/6, 8/7, 8/9, 8/10, 8/11, 8/12, 8/13, 8/14, 8/15, 8/16, 8/17, 8/18, 8/19, 8/20, 9/5, 9/6, 9/7, 9/8, 9/10, 9/11, 9/12, 9/13, 9/14, 9/15, 9/16, 9/17, 9/18, 9/19, 9/20, 10/5, 10/6, 10/7, 10/8, 10/9, 10/11, 10/12, 10/13, 10/14, 10/15, 10/16, 10/17, 10/18, 10/19, 10/20, 11/5, 11/6, 11/7, 11/8, 11/9, 11/10, 11/12, 11/13, 11/14, 11/15, 11/16, 11/17, 11/18, 11/19, 11/20, 12/5, 12/6, 12/7, 12/8, 12/9, 12/10, 12/11, 12/13, 12/14, 12/15, 12/16, 12/17, 12/18, 12/19, 12/20, 13/5, 13/6, 13/7, 13/8, 13/9, 13/10, 13/11, 13/12, 13/14, 13/15, 13/16, 13/17, 13/18, 13/19, 13/20, 14/5, 14/6, 14/7, 14/8, 14/9, 14/10, 14/11, 14/12, 14/13, 14/15, 14/16, 14/17, 14/18, 14/19, 14/20, 15/5, 15/6, 15/7, 15/8, 15/9, 15/10, 15/11, 15/12, 15/13, 15/14, 15/16, 15/17, 15/18, 15/19, 15/20, 16/5, 16/6, 16/7, 16/8, 16/9, 16/10, 16/11, 16/12, 16/13, 16/14, 16/15, 16/17, 16/18, 16/19, 16/20, 17/5, 17/6, 17/7, 17/8, 17/9, 17/10, 17/11, 17/12, 17/13, 17/14, 17/15, 17/16, 17/18, 17/19, 17/20, 18/5, 18/6, 18/7, 18/8, 18/9, 18/10, 18/11, 18/12, 18/13, 18/14, 18/15, 18/16, 18/17, 18/19, 18/20, 19/5, 19/6, 19/7, 19/8, 19/9, 19/10, 19/11, 19/12, 19/13, 19/14, 19/15, 19/16, 19/17, 19/18, 19/20, 20/5, 20/6, 20/7, 20/8, 20/9, 20/10, 20/11, 20/12, 20/13, 20/14, 20/15, 20/16, 20/17, 20/18, or 20/19 asymmetric internal loop, wherein the first number is the number of nucleotides contributed to the symmetric internal loop or the asymmetric internal loop from the engineered guide RNA side of the guide-target RNA scaffold and the second number is the number of nucleotides contributed to the symmetric internal loop or the asymmetric internal loop from the target RNA side of the guide-target RNA scaffold. In some embodiments, the first internal loop is an asymmetric internal loop and the second internal loop is a symmetric internal loop. In some embodiments, the first internal loop is an asymmetric internal loop that is a 5/6, 5/7, 5/8, 5/9, 5/10, 5/11, 5/12, 5/13, 5/14, 5/15, 5/16, 5/17, 5/18, 5/19, 5/20, 6/5, 6/7, 6/8, 6/9, 6/10, 6/11, 6/12, 6/13, 6/14, 6/15, 6/16, 6/17, 6/18, 6/19, 6/20, 7/5, 7/6, 7/8, 7/9, 7/10, 7/11, 7/12, 7/13, 7/14, 7/15, 7/16, 7/17, 7/18, 7/19, 7/20, 8/5, 8/6, 8/7, 8/9, 8/10, 8/11, 8/12, 8/13, 8/14, 8/15, 8/16, 8/17, 8/18, 8/19, 8/20, 9/5, 9/6, 9/7, 9/8, 9/10, 9/11, 9/12, 9/13, 9/14, 9/15, 9/16, 9/17, 9/18, 9/19, 9/20, 10/5, 10/6, 10/7, 10/8, 10/9, 10/11, 10/12, 10/13, 10/14, 10/15, 10/16, 10/17, 10/18, 10/19, 10/20, 11/5, 11/6, 11/7, 11/8, 11/9, 11/10, 11/12, 11/13, 11/14, 11/15, 11/16, 11/17, 11/18, 11/19, 11/20, 12/5, 12/6, 12/7, 12/8, 12/9, 12/10, 12/11, 12/13, 12/14, 12/15, 12/16, 12/17, 12/18, 12/19, 12/20, 13/5, 13/6, 13/7, 13/8, 13/9, 13/10, 13/11, 13/12, 13/14, 13/15, 13/16, 13/17, 13/18, 13/19, 13/20, 14/5, 14/6, 14/7, 14/8, 14/9, 14/10, 14/11, 14/12, 14/13, 14/15, 14/16, 14/17, 14/18, 14/19, 14/20, 15/5, 15/6, 15/7, 15/8, 15/9, 15/10, 15/11, 15/12, 15/13, 15/14, 15/16, 15/17, 15/18, 15/19, 15/20, 16/5, 16/6, 16/7, 16/8, 16/9, 16/10, 16/11, 16/12, 16/13, 16/14, 16/15, 16/17, 16/18, 16/19, 16/20, 17/5, 17/6, 17/7, 17/8, 17/9, 17/10, 17/11, 17/12, 17/13, 17/14, 17/15, 17/16, 17/18, 17/19, 17/20, 18/5, 18/6, 18/7, 18/8, 18/9, 18/10, 18/11, 18/12, 18/13, 18/14, 18/15, 18/16, 18/17, 18/19, 18/20, 19/5, 19/6, 19/7, 19/8, 19/9, 19/10, 19/11, 19/12, 19/13, 19/14, 19/15, 19/16, 19/17, 19/18, 19/20, 20/5, 20/6, 20/7, 20/8, 20/9, 20/10, 20/11, 20/12, 20/13, 20/14, 20/15, 20/16, 20/17, 20/18, or 20/19 asymmetric internal loop; and wherein the second internal loop is a symmetric internal loop that is a 5/5, 6/6, 7/7, 8/8, 9/9, 10/10, 11/11, 12/12, 13/13, 14/14, 15/15, 16/16, 17/17, 18/18, 19/19, or 20/20 symmetric internal loop, wherein the first number is the number of nucleotides contributed to the symmetric internal loop or the asymmetric internal loop from the engineered guide RNA side of the guide-target RNA scaffold and the second number is the number of nucleotides contributed to the symmetric internal loop or the asymmetric internal loop from the target RNA side of the guide-target RNA scaffold. In some embodiments, the first internal loop and the second internal loop comprise the same number of bases. In some embodiments, the first internal loop and the second internal loop comprise a different number of bases. In some embodiments, the first internal loop comprises a greater number of bases than the second internal loop. In some embodiments, the second internal loop comprises a greater number of bases than the first internal loop. In some embodiments, the first internal loop and the second internal loop independently comprise at least about 5 bases to at least about 20 bases of the engineered guide RNA and at least about 5 bases to at least about 20 bases of the target RNA. In some embodiments, the engineered guide RNA comprises a cytosine that, when the engineered guide RNA is hybridized to the target RNA, is present in the guide-target RNA scaffold opposite the on-target adenosine that is edited by the RNA editing entity, thereby forming an A/C mismatch in the guide-target RNA scaffold. In some embodiments, the first internal loop and the second internal loop are positioned the same number of bases from the A/C mismatch with respect to the base of the first internal loop and the base of the second internal loop that is most proximal to the A/C mismatch. In some embodiments, the first internal loop is positioned at least about 5 bases away from the A/C mismatch with respect to the base of the first internal loop that is most proximal to the A/C mismatch. In some embodiments, the first internal loop is positioned from about 1 bases away from the A/C mismatch to about 30 bases away from the A/C mismatch with respect to the base of the first internal loop that is most proximal to the A/C mismatch; optionally wherein the first internal loop is positioned 6 bases, 10 bases, 12 bases, or 15 bases away from the A/C mismatch with respect to the base of the first internal loop that is most proximal to the A/C mismatch. In some embodiments, the second internal loop is positioned at least about 12 bases away from the A/C mismatch with respect to the base of the second internal loop that is most proximal to the A/C mismatch. In some embodiments, the second internal loop is positioned from about 12 bases away from the A/C mismatch to about 40 bases away from the A/C mismatch with respect to the base of the second internal loop that is most proximal to the A/C mismatch; optionally wherein the second internal loop is positioned 24 bases, 30 bases, 33 bases, or 34 bases away from the A/C mismatch with respect to the base of the second internal loop that is most proximal to the A/C mismatch. In some embodiments, the target RNA is an mRNA selected from the group consisting of: ABCA4, APP, CFTR, DMPK, DUX4, GAPDH, GBA, GRN, HEXA, LIPA, LRRK2, MAPT, PINK1, PMP22, SERPINA1, SNCA, or SOD1, a fragment of any one of these, and any combination thereof. In some embodiments, the target RNA is ABCA4, and wherein the ABCA4 comprises a target mutation for RNA editing selected from the group consisting of: G6320A; G5714A; G5882A; and any combination thereof. In some embodiments, the first internal loop is positioned from about 5 bases away from the A/C mismatch to about 15 bases away from the A/C mismatch with respect to the base of the first internal loop that is most proximal to the A/C mismatch. In some embodiments, the first internal loop is positioned 15 bases away from the A/C mismatch with respect to the base of the first internal loop that is most proximal to the A/C mismatch. In some embodiments, the second internal loop is positioned from about 12 bases away from the A/C mismatch to about 40 bases away from the A/C mismatch with respect to the base of the second internal loop that is most proximal to the A/C mismatch. In some embodiments, the second internal loop is positioned 33 bases away from the A/C mismatch with respect to the base of the second internal loop that is most proximal to the A/C mismatch. In some embodiments, the engineered guide RNA comprises a polynucleotide sequence with at least 80%, 85%, 90%, 92%, 95%, 97%, or 99% sequence identity to any one of SEQ ID NO: 1-105, 2729-2761, or 2772-2843. In some embodiments, the target RNA is APP, and wherein a target mutation is introduced into the APP RNA, wherein a polypeptide encoded by the APP RNA after modification comprises a polypeptide mutation selected from the group consisting of: K670E, K670R, K670G, M671V, A673V, A673T, D672G, E682G, H684R, K687R, K687E, K687G, I712X, T714X, and any combination thereof. In some embodiments, the first internal loop is positioned from about 5 bases away from the A/C mismatch to about 20 bases away from the A/C mismatch with respect to the base of the first internal loop that is most proximal to the A/C mismatch. In some embodiments, the first internal loop is positioned 10 bases away from the A/C mismatch with respect to the base of the first internal loop that is most proximal to the A/C mismatch. In some embodiments, the second internal loop is positioned from about 15 bases away from the A/C mismatch to about 40 bases away from the A/C mismatch with respect to the base of the second internal loop that is most proximal to the A/C mismatch. In some embodiments, the second internal loop is positioned 33 bases away from the A/C mismatch with respect to the base of the second internal loop that is most proximal to the A/C mismatch. In some embodiments, the engineered guide RNA comprises a polynucleotide sequence with at least 80%, 85%, 90%, 92%, 95%, 97%, or 99% sequence identity to any one of SEQ ID NO: 112-114. In some embodiments, the target RNA is SERPINA1, and wherein the SERPINA encodes a polypeptide that comprises an E342K mutation. In some embodiments, the first internal loop is positioned from about 5 bases away from the A/C mismatch to about 20 bases away from the A/C mismatch with respect to the base of the first internal loop that is most proximal to the A/C mismatch. In some embodiments, the first internal loop is positioned 12 bases away from the A/C mismatch with respect to the base of the first internal loop that is most proximal to the A/C mismatch. In some embodiments, the second internal loop is positioned from about 12 bases away from the A/C mismatch to about 40 bases away from the A/C mismatch with respect to the base of the second internal loop that is most proximal to the A/C mismatch. In some embodiments, the second internal loop is positioned 24 bases away from the A/C mismatch with respect to the base of the second internal loop that is most proximal to the A/C mismatch. In some embodiments, the engineered guide RNA comprises a polynucleotide sequence with at least 80%, 85%, 90%, 92%, 95%, 97%, or 99% sequence identity to any one of SEQ ID NO: 2762-2768 or 3083-3086. In some embodiments, the target RNA is LRRK2, and wherein the LRRK2 encodes a polypeptide with a polypeptide mutation selected from the group consisting of: E10L, A30P, S52F, E46K, A53T, L119P, A211V, C228S, E334K, N363S, V366M, A419V, R506Q, N544E, N551K, A716V, M712V, I723V, P755L, R793M, I810V, K871E, Q923H, Q930R, R1067Q, S1096C, Q1111H, I1122V, A1151T, L1165P, I1192V, H1216R, S1228T, P1262A, R1325Q, I1371V, R1398H, T1410M, D1420N, R1441G, R1441H, A1442P, P1446L, V1450I, K1468E, R1483Q, R1514Q, P1542S, V1613A, R1628P, M1646T, S1647T, Y1699C, R1728H, R1728L, L1795F, M1869V, M1869T, L1870F, E1874X, R1941H, Y2006H, I2012T, G2019S, I2020T, T2031S, N2081D, T2141M, R2143H, Y2189C, T2356I, G2385R, V2390M, E2395K, M2397T, L2466H, Q2490NfsX3, and any combination thereof. In some embodiments, the first internal loop is positioned from about 7 bases away from the A/C mismatch to about 30 bases away from the A/C mismatch with respect to the base of the first internal loop that is most proximal to the A/C mismatch. In some embodiments, the first internal loop is positioned 10 bases away from the A/C mismatch with respect to the base of the first internal loop that is most proximal to the A/C mismatch. In some embodiments, the second internal loop is positioned from about 18 bases away from the A/C mismatch to about 34 bases away from the A/C mismatch with respect to the base of the second internal loop that is most proximal to the A/C mismatch. In some embodiments, the second internal loop is positioned 34 bases away from the A/C mismatch with respect to the base of the second internal loop that is most proximal to the A/C mismatch. In some embodiments, the engineered guide RNA comprises a polynucleotide sequence with at least 80%, 85%, 90%, 92%, 95%, 97%, or 99% sequence identity to any one of SEQ ID NO: 118-167, 2686-2728, 2769-2771, 2844-3078, or 3081-3082. In some embodiments, the target RNA is SNCA, and wherein the SNCA comprises a target mutation for RNA editing selected from the group consisting of: translation initiation site (TIS) ATG to GTG in Codon 1 and Codon 5; AUG at position 265 in Exon 2. In some embodiments, the first internal loop is positioned from about 6 bases away from the A/C mismatch to about 20 bases away from the A/C mismatch with respect to the base of the first internal loop that is most proximal to the A/C mismatch. In some embodiments, the first internal loop is positioned 6 bases away from the A/C mismatch with respect to the base of the first internal loop that is most proximal to the A/C mismatch. In some embodiments, the second internal loop is positioned from about 15 bases away from the A/C mismatch to about 38 bases away from the A/C mismatch with respect to the base of the second internal loop that is most proximal to the A/C mismatch. In some embodiments, the second internal loop is positioned 34 bases away from the A/C mismatch with respect to the base of the second internal loop that is most proximal to the A/C mismatch. In some embodiments, the engineered guide RNA comprises a polynucleotide sequence with at least 80%, 85%, 90%, 92%, 95%, 97%, or 99% sequence identity to any one of SEQ ID NO: 2480-2681. In some embodiments, the target RNA is MAPT, and wherein the MAPT comprises a target mutation for RNA editing at the translation initiation site (TIS). In some embodiments, the first internal loop is positioned from about 5 bases away from the A/C mismatch to about 15 bases away from the A/C mismatch with respect to the base of the first internal loop that is most proximal to the A/C mismatch. In some embodiments, the first internal loop is positioned 15 bases away from the A/C mismatch with respect to the base of the first internal loop that is most proximal to the A/C mismatch. In some embodiments, the second internal loop is positioned from about 12 bases away from the A/C mismatch to about 40 bases away from the A/C mismatch with respect to the base of the second internal loop that is most proximal to the A/C mismatch. In some embodiments, the second internal loop is positioned 33 bases away from the A/C mismatch with respect to the base of the second internal loop that is most proximal to the A/C mismatch. In some embodiments, the engineered guide RNA comprises a polynucleotide sequence with at least 80%, 85%, 90%, 92%, 95%, 97%, or 99% sequence identity to any one of SEQ ID NO: 115-117, 1519-2479 or 2682-2685. In some embodiments, the target RNA is DUX4. In some embodiments, the first internal loop is positioned from about 1 base away from the A/C mismatch to about 20 bases away from the A/C mismatch with respect to the base of the first internal loop that is most proximal to the A/C mismatch. In some embodiments, the first internal loop is positioned 6 bases away from the A/C mismatch with respect to the base of the first internal loop that is most proximal to the A/C mismatch. In some embodiments, the second internal loop is positioned from about 15 bases away from the A/C mismatch to about 40 bases away from the A/C mismatch with respect to the base of the second internal loop that is most proximal to the A/C mismatch. In some embodiments, the second internal loop is positioned 33 bases away from the A/C mismatch with respect to the base of the second internal loop that is most proximal to the A/C mismatch. In some embodiments, the engineered guide RNA comprises a polynucleotide sequence with at least 80%, 85%, 90%, 92%, 95%, 97%, or 99% sequence identity to any one of SEQ ID NO: 172-1518. In some embodiments, the target RNA is GRN. In some embodiments, the first internal loop is positioned from about 5 bases away from the A/C mismatch to about 20 bases away from the A/C mismatch with respect to the base of the first internal loop that is most proximal to the A/C mismatch. In some embodiments, the first internal loop is positioned 12 bases away from the A/C mismatch with respect to the base of the first internal loop that is most proximal to the A/C mismatch. In some embodiments, the second internal loop is positioned from about 18 bases away from the A/C mismatch to about 38 bases away from the A/C mismatch with respect to the base of the second internal loop that is most proximal to the A/C mismatch. In some embodiments, the second internal loop is positioned 34 bases away from the A/C mismatch with respect to the base of the second internal loop that is most proximal to the A/C mismatch. In some embodiments, the engineered guide RNA comprises a length of at least about 60 bases. In some embodiments, the engineered guide RNA comprises a length of about 65 bases to about 150 bases. In some embodiments, the at least one structural feature comprises a bulge. In some embodiments, the bulge comprises an asymmetric bulge. In some embodiments, the bulge comprises a symmetric bulge. In some embodiments, the bulge independently comprises about 1 base to about 4 bases of the engineered guide RNA and about 0 bases to about 4 bases of the target RNA. In some embodiments, the at least one structural feature comprises an internal loop. In some embodiments, the internal loop comprises an asymmetric internal loop. In some embodiments, the internal loop comprises a symmetric internal loop. In some embodiments, the internal loop independently comprises about 5 to about 10 bases of either the engineered guide RNA or the target RNA. In some embodiments, the at least one structural feature comprises a hairpin. In some embodiments, the hairpin comprises a length of about 3 bases to about 15 bases in length. In some embodiments, the RNA editing entity is endogenous to a mammalian cell. In some embodiments, the RNA editing entity is an adenosine deaminase acting on RNA (ADAR) enzyme, a catalytically active fragment thereof, or a fusion polypeptide thereof. In some embodiments, the RNA editing entity is the ADAR enzyme. In some embodiments, the ADAR enzyme comprises human ADAR (hADAR). In some embodiments, the ADAR enzyme comprises ADAR1 or ADAR2. In some embodiments, the target RNA is an mRNA or pre-mRNA. In some embodiments, the engineered guide RNA further comprises at least one chemical modification. In some embodiments, the at least one chemical modification comprises a 2′-O-methyl group on a ribose sugar of a nucleotide of the engineered guide RNA. In some embodiments, the at least one chemical modification comprises a phosphothioate modification of a backbone of the engineered guide RNA. In some embodiments, the engineered guide comprises a total polynucleotide length of at least about 65 bases. In some embodiments, the engineered guide comprises a total polynucleotide length range of about 65 bases to about 100 bases. In some embodiments, the engineered guide RNA is a circular guide RNA.

[0005] Also disclosed herein is a polynucleotide encoding an engineered guide RNA as described herein.

[0006] Also disclosed herein is a delivery vehicle comprising an engineered guide RNA as described herein or a polynucleotide as described herein. In some embodiments, the delivery vehicle is selected from the group consisting of: a delivery vector, a liposome, a particle, and any combination thereof. In some embodiments, the delivery vehicle is a delivery vector, wherein the delivery vector comprises a viral vector. In some embodiments, the viral vector comprises an adeno-associated viral (AAV) vector or derivative thereof. In some embodiments, the AAV vector or derivative thereof is from an adeno-associated virus having a serotype selected from the group consisting of: AAV1, AAV2, AAV3, AAV4, AAV5, AAV6, AAV7, AAV8, AAV9, AAV10, AAV11, AAV12, AAV13, AAV14, AAV15, AAV16, AAV.rh8, AAV.rh10, AAV.rh20, AAV.rh39, AAV.Rh74, AAV.RHM4-1, AAV.hu37, AAV.Anc80, AAV.Anc80L65, AAV.7m8, AAV.PHP.B, AAV2.5, AAV2tYF, AAV3B, AAV.LK03, AAV.HSC1, AAV.HSC2, AAV.HSC3, AAV.HSC4, AAV.HSC5, AAV.HSC6, AAV.HSC7, AAV.HSC8, AAV.HSC9, AAV.HSC10, AAV.HSC11, AAV.HSC12, AAV.HSC13, AAV.HSC14, AAV.HSC15, AAV.HSC16, and AAVhu68. In some embodiments, the AAV vector or derivative thereof is a recombinant AAV (rAAV) vector, a hybrid AAV vector, a chimeric AAV vector, a single stranded AAV (ss-AAV), a self-complementary AAV (scAAV) vector, or any combination thereof.

[0007] Also disclosed herein is a pharmaceutical composition comprising: (a) an engineered guide RNA as described herein, a polynucleotide as described herein, or a delivery vehicle as described herein; and (b) a pharmaceutically acceptable excipient, diluent, or carrier.

[0008] Also disclosed herein is a method of treating a disease in a subject in need thereof, the method comprising: administering to the subject an effective amount of an engineered guide RNA as described herein, a polynucleotide as described herein, a delivery vehicle as described herein, or a pharmaceutical composition as described herein, wherein the effective amount is sufficient to treat the disease in the subject. In some embodiments, the administering is intrathecal, intraocular, intravitreal, retinal, intravenous, intramuscular, intraventricular, intracerebral, intracerebellar, intracerebroventricular, intraperenchymal, subcutaneous, or a combination thereof. In some embodiments, the disease is macular degeneration. In some embodiments, the disease is Stargardt Disease. In some embodiments, the disease comprises a neurological disease. In some embodiments, the neurological disease comprises Parkinson's disease, Alzheimer's disease, a Tauopathy, or dementia. In some embodiments, the disease comprises a liver disease. In some embodiments, the liver disease comprises liver cirrhosis. In some embodiments, the liver disease comprises alpha-1 antitrypsin deficiency (AAT deficiency). In some embodiments, the target RNA is ABCA4. In some embodiments, the ABCA4 comprises a target mutation for RNA editing selected from the group consisting of: G6320A; G5714A; G5882A; and any combination thereof. In some embodiments, the subject is diagnosed with the disease.

[0009] Also disclosed herein is a method of improving an editing efficiency of an engineered guide RNA configured to facilitate an edit of an adenosine in a target RNA via an RNA editing entity, wherein upon hybridization, the engineered guide RNA and the sequence of the target RNA form a guide-target RNA scaffold, wherein the guide-target RNA scaffold comprises: a region that comprises at least one structural feature selected from the group consisting of: a bulge, a wobble base pair, an internal loop, a mismatch, a hairpin, and any combination thereof, wherein, upon contacting the guide-target RNA scaffold with an RNA editing entity, the RNA editing entity edits an on-target adenosine in the target RNA within the guide-target RNA scaffold, the method comprising inserting a first sequence and a second sequence into the engineered guide RNA that, when the engineered guide RNA is hybridized to the target RNA, form a first internal loop and a second internal loop, respectively, on opposing ends of the region of the guide-target RNA scaffold; wherein the first internal loop and the second internal loop facilitate an increase in the amount of the editing of the on-target adenosine in the target RNA relative to an otherwise comparable engineered guide RNA lacking the first internal loop and the second internal loop, thereby improving the editing efficiency of the engineered guide RNA.

[0010] Also disclosed herein is an engineered guide RNA as described herein, a polynucleotide as described herein, a delivery vehicle as described herein, or a pharmaceutical composition as described herein, for use in treatment of a disease. In some embodiments, the medicament is administered via the intrathecal, intraocular, intravitreal, retinal, intravenous, intramuscular, intraventricular, intracerebral, intracerebellar, intracerebroventricular, intraperenchymal, or subcutaneous routes or a combination thereof. In some embodiments, the disease is macular degeneration. In some embodiments, the disease is Stargardt Disease. In some embodiments, the disease comprises a neurological disease. In some embodiments, the neurological disease comprises Parkinson's disease, Alzheimer's disease, a Tauopathy, or dementia. In some embodiments, the disease comprises a liver disease. In some embodiments, the liver disease comprises liver cirrhosis. In some embodiments, the liver disease comprises alpha-1 antitrypsin deficiency (AAT deficiency). In some embodiments, the target RNA is ABCA4. In some embodiments, the ABCA4 comprises a target mutation for RNA editing selected from the group consisting of: G6320A; G5714A; G5882A; and any combination thereof.

### BRIEF DESCRIPTION OF THE DRAWINGS

[0011] Novel features of the present disclosure are set forth with particularity in the appended claims. A better understanding of the features and advantages of the present disclosure will be obtained by reference to the following detailed description that sets forth illustrative embodiments and the accompanying drawings of which:

[0012] FIG. 1 shows various guide RNA engineering. (1) Micro-footprint positioning; (2) Micro-footprint within a macro-footprint (left bell coordinates: LB, generally with the coordinates recited with respect to mismatch; right bell coordinates: RB, generally with the coordinates recited with respect to mismatch); and (3) Guide shortening.

[0013] FIG. 2 shows an exemplary micro-footprint having a (+) RNA editing region and a (−) RNA editing region with complementarity within a macro-footprint, which includes two internal symmetrical loops, each of which flanking opposing ends of the micro-footprint. The left/first internal symmetrical loop is −6 bases from the target adenosine (A-C) mismatch, while the right/second internal symmetrical loop is +30 bases from the A-C mismatch.

[0014] FIG. 3 shows guide-target RNA scaffolds formed by engineered RNA guides of varying lengths of ABCA4 edited by ADAR1 (in duplicate), where 0.85.65 guides for both biological replicates demonstrated an RNA editing percentage of about 15%. As shown in FIG. 3, the 0.85.65 guide drives higher RNA editing efficiency and also mediates specificity, relative to comparable guides screened in FIG. 3.

[0015] FIG. 4 shows varying guide-target RNA scaffolds formed by engineered RNA guides, where the second internal symmetrical loop (or right bell) is located at varying distances from the target adenosine to be edited while the left barbell is left at position −5 relative to the mismatch. Guides 0.85.65 (−5, +33) and 0.85.65 (−5, +27) demonstrated an RNA editing percentage of more than about 15%.

[0016] FIG. 5 shows the ADAR profiles depicting ADAR-mediated RNA editing percentage for each of the engineered RNA guides (0.85.65 (−5, +33) and 0.85.65 (−5,+27)) and control without the first and second internal symmetrical loops (0.85.65).

[0017] FIG. 6 shows varying guide-target RNA scaffolds formed by engineered RNA guides for 0.85.65, where the first internal symmetrical loop (or left bell) is located at varying distances from the mismatch.

[0018] FIG. 7 shows varying guide-target RNA scaffolds formed by engineered RNA guides, where the first internal symmetrical loop (or left bell) is located at varying distances from the mismatch. Exemplary guides 0.85.65 (−10, +33) and 0.85.65 (−9,+33) demonstrate an ADAR-mediated RNA editing percentage of more than about 30%.

[0019] FIG. 8 shows the target positions and ADAR-mediated RNA editing percentage for each of the exemplary engineered RNA guides (0.85.65 (−5, +33), 0.85.65 (−9,+33), and 0.85.65 (−10,+33), where GAA is edited at the second base position, which is identified as the zero target position denoted as “0” on the x-axis. Each of the exemplary guides demonstrate an ADAR-mediated RNA editing percentage of more than about 40% at the zero target position.

[0020] FIG. 9 shows specific biological replicate and average RNA editing percentages for varying guide-target RNA scaffolds formed by engineered RNA guides via ADAR, where exemplary guides have an ADAR-mediated RNA editing percentage of about 20% or greater (e.g., 0.100.65, 0.100.67, 0.100.70, 0.100.72) As shown in FIG. 9, the positioning of the mismatch modulates RNA editing, with the 100.70 guide representing a superior configuration.).

[0021] FIG. 10 shows varying guide-target RNA scaffolds formed by engineered RNA guides, where the second internal symmetrical loop (or right bell) is located at varying distances from the mismatch based on guide 0.100.70.

[0022] FIG. 11 shows exemplary guide-target RNA scaffolds formed by engineered RNA guides of edited ABCA4, where the second internal symmetrical loop (or right bell) is located at varying distances from the mismatch. Guide 0.100.70 (−5, +32) demonstrated an ADAR-mediated RNA editing percentage of more than about 17%, which is the ADAR-mediated RNA editing percentage of guide 0.100.70 without the first and second internal symmetrical loops.

[0023] FIG. 12 shows varying guide-target RNA scaffolds formed by engineered RNA guides, where the first internal symmetrical loop (or left bell) is located at varying distances from the mismatch based on guide 0.100.70.

[0024] FIG. 13 shows exemplary guide-target RNA scaffolds formed by engineered RNA guides of edited ABCA4, where the first internal symmetrical loop (or left bell) is located at varying distances from the mismatch. Exemplary guides 0.100.70 (−5, +33), 0.100.70 (−6, +33), 0.100.70 (−9, +33), 0.100.70 (−11, +33), 0.100.70 (−12, +33), 0.100.70 (−13, +33), 0.100.70 (−14, +33), and 0.100.70 (−15, +33) demonstrated an ADAR-mediated RNA editing percentage of more than about 34%, which is the ADAR-mediated RNA editing percentage of guide 0.100.70 without the first and second internal symmetrical loops.

[0025] FIG. 14 shows the target positions and ADAR-mediated RNA editing percentage for each of the exemplary engineered RNA guides 0.100.70 (−5, +33), 0.100.70 (−9, +33), 0.100.70 (−13, +33), 0.100.70 (−14, +33), and 0.100.70 (−15, +33), and 0.100.70 without the first and second internal symmetrical loops, where the edited base position is identified as the zero target position. Each of the exemplary guides except for 0.100.70 demonstrate an ADAR-mediated RNA editing percentage of more than about 30% at the zero target position or target 0 position.

[0026] FIG. 15 shows exemplary guide-target RNA scaffolds formed by engineered RNA guides of edited ABCA4 based on a first internal symmetrical loop (LB) located −9 bases or −15 bases from the mismatch and a second internal symmetrical loop (RB) located +33 bases from the mismatch, where the total length of the guide is varied via 2nt precise deletions from the 5′ end of the guide as well as the length upstream of the mismatch (e.g., 0 position).

[0027] FIG. 16 shows exemplary guide-target RNA scaffolds formed by engineered RNA guides of FIG. 15, where the first internal symmetrical loop (or left bell) and the second internal symmetrical loop (or right bell) are maintained at positions −9 and +33, respectively, with varying lengths from the mismatch. Exemplary guides 0.92.62 (−9, +33), 0.94.64 (−9, +33), and 0.96.66 (−9, +33) demonstrated an ADAR-mediated RNA editing percentage of more than about 38%, which is the RNA editing percentage of guide 0.100.70 (−9, +33).

[0028] FIG. 17 shows the target positions and ADAR-mediated RNA editing percentage for each of the exemplary engineered RNA guides 0.92.62 (−9, +33), 0.94.64 (−9, +33), and 0.96.66 (−9, +33), where the edited base position is identified as the zero target position. Each of the exemplary guides demonstrate an ADAR-mediated RNA editing percentage of more than about 40% at the zero target position.

[0029] FIG. 18 shows exemplary guide-target RNA scaffolds formed by engineered RNA guides of FIG. 15, where the first internal symmetrical loop (or left bell) and the second internal symmetrical loop (or right bell) are maintained at positions −15 and +33, respectively, with varying lengths from the mismatch. Exemplary guides 0.90.60 (−15, +33), 0.92.62 (−15, +33), and 0.94.64 (−15, +33) demonstrated an ADAR-mediated RNA editing percentage of more than about 46%, which is the ADAR-mediated RNA editing percentage of guide 0.96.66 (−15, +33).

[0030] FIG. 19 shows the target positions and ADAR-mediated RNA editing percentage for each of the exemplary engineered RNA guides 0.90.60 (−15, +33), 0.92.62 (−15, +33), and 0.94.64 (−15, +33), where the edited base position is identified as the zero target position or target 0 position. Each of the exemplary guides demonstrate an ADAR-mediated RNA editing percentage of more than about 46% at the zero target position or target 0 position.

[0031] FIG. 20 shows the target positions and ADAR-mediated RNA editing percentage for exemplary engineered RNA guides pre-improvement (guide 0.100.80 without first and second internal loops) and post-improvement (guide 0.92.62 (−15, +33) with first and second internal loops), where the edited base position is identified as the zero target position. The pre-improvement guide (0.100.80) illustrates an ADAR-mediated RNA editing percentage of about 12% at the zero target position, and the post-improvement guide (0.92.62 (−15, +33)) illustrates an ADAR-mediated RNA editing percentage of about 58% at the zero target position.

[0032] FIG. 21 shows exemplary guide-target RNA scaffolds formed by engineered RNA guides, where the target RNAs are ABCA4 with first and second internal loops (−9, +33) and GAPDH with an A-C mismatch (GAPDH 100.70 A-C), with the micro-footprint (GAPDH Shaker mimicry), and GAPDH with first and second internal loops (GAPDH Shaker mimicry −9, +33).

[0033] FIG. 22 shows the ADAR-mediated RNA editing percentages of GAPDH engineered RNA guides of FIG. 21 and controls (No transfection; GFP plasmid) for biological replicates. Exemplary GAPDH RNA guides 0.100.70 (−9, +33) demonstrated an ADAR-mediated RNA editing percentage of more than about 25%, which is the ADAR-mediated RNA editing percentage of GAPDH RNA guide 0.100.70 (−9, +33).

[0034] FIG. 23 shows the ADAR-mediated RNA editing percentages of GAPDH engineered RNA guides of FIG. 21. Exemplary GAPDH with the A-C mismatch (top panel), with the micro-footprint (middle panel), and GAPDH with first and second internal loops (bottom panel), where the GAPDH engineered RNA guide with the macro-footprint (bottom panel) illustrates an ADAR-mediated RNA editing percentage of more than about 20% at the zero target position.

[0035] FIG. 24 shows exemplary guide-target RNA scaffolds formed by engineered RNA guides, where the target RNA is Rab7a with an A-C mismatch (Rab7a 100.70 A-C; SEQ ID NO:109), with the micro-footprint (Rab7a 100.70 Shaker mimicry; SEQ ID NO:110), and Rab7a with first and second internal loops (Rab7a Shaker mimicry −9,+33; SEQ ID NO111).

[0036] FIG. 25 shows the ADAR-mediated RNA editing percentages of Rab7a engineered RNA guides of FIG. 24 and controls (No transfection; GFP plasmid) for biological replicates. Exemplary Rab7a RNA guide 0.100.70 (−9, +33) demonstrated an ADAR-mediated RNA editing percentage of about 30%, where the controls demonstrated an ADAR-mediated RNA editing percentage of about 5%.

[0037] FIG. 26 shows the target positions and ADAR-mediated RNA editing percentages of Rab7a engineered RNA guides of FIG. 24, where the edited base position is identified as the zero target position or target 0 position. The Rab7a shaker mimicry guide (0.100.70 (−9, +33)) illustrates an ADAR-mediated RNA editing percentage of more than about 20% at the zero target position with fewer off-target edits.

[0038] FIG. 27 shows exemplary guide-target RNA scaffolds formed by engineered RNA guides, where the target RNA is APP with an A-C mismatch (APP 100.70 A-C; SEQ ID NO:112), with the micro-footprint (APP 100.70 Shaker mimicry; SEQ ID NO:113), and APP with first and second internal loops (APP Shaker mimicry −9,+33; SEQ ID NO:114).

[0039] FIG. 28 shows the ADAR-mediated RNA editing percentages of APP engineered RNA guides of FIG. 27 and controls (No transfection; GFP plasmid) for biological replicates. Exemplary APP RNA guide 0.100.70 (−9, +33) demonstrated an ADAR-mediated RNA editing percentage of about 13%, where the controls demonstrated an ADAR-mediated RNA editing percentage of about 2%.

[0040] FIG. 29 shows the target positions and ADAR-mediated RNA editing percentages of APP engineered RNA guides of FIG. 27, where the edited base position is identified as the zero target position or target 0 position. The APP shaker mimicry guide (0.100.70 (−9, +33)) illustrates an ADAR-mediated RNA editing percentage of more than about 20% at the zero target position with fewer off-target edits than the A-C mismatch or Shaker mimicry MAPT RNA guides.

[0041] FIG. 30 shows exemplary guide-target RNA scaffolds formed by engineered RNA guides, where the target RNA is MAPT with an A-C mismatch (MAPT 100.70 A-C, with the micro-footprint (MAPT 100.70 Shaker mimicry), and MAPT with first and second internal loops (MAPT Shaker mimicry −9,+33).

[0042] FIG. 31 shows the ADAR-mediated RNA editing percentages of MAPT engineered RNA guides of FIG. 30 and controls (No transfection; GFP plasmid) for biological replicates. Exemplary MAPT RNA guide 0.100.70 (−9, +33) demonstrated an ADAR-mediated RNA editing percentage of more than about 40%, where the controls demonstrated an ADAR-mediated RNA editing percentage of less than about 5%.

[0043] FIG. 32 shows the target positions and ADAR-mediated RNA editing percentages of MAPT engineered RNA guides of FIG. 30, where the edited base position is identified as the zero target position or target 0 position. The MAPT shaker mimicry guide (0.100.70 (−9, +33)) illustrates an ADAR-mediated RNA editing percentage of more than about 40% at the zero target position with fewer off-target edits than the A-C mismatch or Shaker mimicry MAPT RNA guides.

[0044] FIG. 33 shows a summary of how a library for screening longer self-annealing RNA structures was generated.

[0045] FIG. 34 shows a comparison of cell-free RNA editing using the high throughput described here versus in-cell RNA editing facilitated via the same engineered guide RNA sequence at various timepoints.

[0046] FIG. 35 shows heatmaps of all self-annealing RNA structures tested for 4 micro-footprints (A/C mismatch, 2108, 871, and 919) formed within varying placement of a barbell macro-footprint. The y-axis shows all candidate engineered guide RNAs tested and the x-axis shows the target sequence positions, with position 0 representing the target adenosine to be edited.

[0047] FIG. 36 shows a legend of various exemplary structural features present in guide-target RNA scaffolds formed upon hybridization of a latent guide RNA of the present disclosure to a target RNA. Example structural features shown include an 8/7 asymmetric loop (8 nucleotides on the target RNA side and 7 nucleotides on the guide RNA side), a 2/2 symmetric bulge (2 nucleotides on the target RNA side and 2 nucleotides on the guide RNA side), a 1/1 mismatch (1 nucleotide on the target RNA side and 1 nucleotide on the guide RNA side), a 5/5 symmetric internal loop (5 nucleotides on the target RNA side and 5 nucleotides on the guide RNA side), a 24 bp region (24 nucleotides on the target RNA side base paired to 24 nucleotides on the guide RNA side), and a 2/3 asymmetric bulge (2 nucleotides on the target RNA side and 3 nucleotides on the guide RNA side).

[0048] FIG. 37 depicts on-target editing (x-axis) vs. specificity (y-axis) of various guide RNAs via ADAR against LRRK2 (left most), APP/GRN/SNCA (top row, left to right), and DUX4/ABCA4/SERPINA1 (bottom row, left to right).

[0049] FIGS. 38A-D show LRRK2 RNA editing profiles of various engineered guide RNAs of the present disclosure via ADAR.

[0050] FIG. 39 shows the LRRK2 ADAR-mediated RNA editing profile of an engineered guide RNA of the present disclosure, which forms a barbell macro-footprint and a micro-footprint in the guide-target RNA scaffold.

[0051] FIG. 40 depicts an illustration of a strategy to minimize +1 editing by modulating structures within the guide-target RNA complex.

[0052] FIG. 41 depicts tiling of symmetrical internal loops within the guide-target RNA complex to minimize +1 editing.

[0053] FIG. 42 depicts engineering of guides that edit the target adenosine of ABCA4 with minimal +1 editing by utilizing symmetrical internal loops within the guide-target RNA complex.

[0054] FIG. 43 is a summary of showing the progression of engineering of a candidate guide RNA to minimize +1 editing by utilizing symmetrical internal loops within the guide-target RNA complex.

[0055] FIGS. 44A-44C depict the ADAR-mediated RNA editing efficiency of guide RNAs designed through machine learning targeting LRRK2 in an in-cell editing model, each having a barbell macro-footprint with symmetrical internal loops at positions −20 and +26.

[0056] FIG. 45 shows LRRK2 target RNA editing for a control engineered guide and exemplary engineered guide 919 via ADAR1 and ADAR1+ADAR2.

[0057] FIG. 46 shows LRRK2 target RNA editing for exemplary engineered guide 1976 and exemplary engineered guide 2397 via ADAR1 and ADAR1+ADAR2.

[0058] FIG. 47 shows LRRK2 target RNA editing for exemplary engineered guide 871 and exemplary engineered guide 610 via ADAR1 and ADAR1+ADAR2.

[0059] FIG. 48 shows LRRK2 target RNA editing for exemplary engineered guides ML generative 0703 and ML generative 0719 designed by machine learning via ADAR1 and ADAR1+ADAR2.

[0060] FIG. 49 shows LRRK2 target RNA editing for exemplary engineered guides ML generative 0728 and ML generative 0732 designed by machine learning via ADAR1 and ADAR1+ADAR2.

[0061] FIG. 50 shows LRRK2 target RNA editing for exemplary engineered guides ML generative 0733 and ML generative 0742 designed by machine learning via ADAR1 and ADAR1+ADAR2.

[0062] FIG. 51 shows LRRK2 target RNA editing for exemplary engineered guides ML generative 0743 and ML generative 0745 designed by machine learning via ADAR1 and ADAR1+ADAR2.

[0063] FIG. 52 shows LRRK2 target RNA editing for exemplary engineered guides ML generative 0766 and ML generative 0769 designed by machine learning via ADAR1 and ADAR1+ADAR2.

[0064] FIG. 53 shows LRRK2 target RNA editing for exemplary engineered guides ML generative 0766 and ML generative 0769 designed by machine learning via ADAR1 and ADAR1+ADAR2.

[0065] FIG. 54 shows LRRK2 target RNA editing for exemplary engineered guides ML exhaustive 0049 and ML exhaustive 0069 designed by machine learning via ADAR1 and ADAR1+ADAR2.

[0066] FIG. 55 shows LRRK2 target RNA editing for exemplary engineered guides ML exhaustive 0090 and ML exhaustive 0139 designed by machine learning via ADAR1 and ADAR1+ADAR2.

[0067] FIG. 56 shows LRRK2 target RNA editing for exemplary engineered guides ML generative 0274 and ML generative 0325 designed by machine learning via ADAR1 and ADAR1+ADAR2.

[0068] FIG. 57 shows LRRK2 target RNA editing for exemplary engineered guides ML generative 0332 and ML generative 0559 designed by machine learning via ADAR1 and ADAR1+ADAR2.

[0069] FIG. 58 shows LRRK2 target RNA editing for exemplary engineered guides ML generative 0639 and ML generative 0643 designed by machine learning via ADAR1 and ADAR1+ADAR2.

[0070] FIG. 59 shows LRRK2 target RNA editing for exemplary engineered guides ML generative 0644 and ML generative 0690 designed by machine learning via ADAR1 and ADAR1+ADAR2.

[0071] FIG. 60 shows LRRK2 target RNA editing for exemplary engineered guides ML generative 0699 and ML generative 0701 designed by machine learning via ADAR1 and ADAR1+ADAR2.

[0072] FIG. 61 shows LRRK2 target RNA editing for exemplary engineered guides ML exhaustive 0395 and ML exhaustive 0453 designed by machine learning via ADAR1 and ADAR1+ADAR2.

[0073] FIG. 62 shows LRRK2 target RNA editing for exemplary engineered guides ML exhaustive 0464 and ML exhaustive 1042 designed by machine learning via ADAR1 and ADAR1+ADAR2.

[0074] FIG. 63 shows LRRK2 target RNA editing for exemplary engineered guides ML generative 0002 and ML generative 0013 designed by machine learning via ADAR1 and ADAR1+ADAR2.

[0075] FIG. 64 shows LRRK2 target RNA editing for exemplary engineered guides ML generative 0016 and ML generative 0043 designed by machine learning via ADAR1 and ADAR1+ADAR2.

[0076] FIG. 65 shows LRRK2 target RNA editing for exemplary engineered guides ML generative 0058 and ML generative 0071 designed by machine learning via ADAR1 and ADAR1+ADAR2.

[0077] FIG. 66 shows LRRK2 target RNA editing for exemplary engineered guides ML generative 0130 and ML generative 0156 designed by machine learning via ADAR1 and ADAR1+ADAR2.

[0078] FIG. 67 shows LRRK2 target RNA editing for exemplary engineered guides ML generative 0176 and ML generative 0218 designed by machine learning via ADAR1 and ADAR1+ADAR2.

[0079] FIG. 68 shows LRRK2 target RNA editing for exemplary engineered guides ML exhaustive 1045 and ML exhaustive 1540 designed by machine learning via ADAR1 and ADAR1+ADAR2.

[0080] FIG. 69 shows LRRK2 target RNA editing for exemplary engineered guides ML exhaustive 0315 and ML exhaustive 0414 designed by machine learning via ADAR1 and ADAR1+ADAR2.

[0081] FIG. 70 shows LRRK2 target RNA editing for exemplary engineered guide ML exhaustive 0013 designed by machine learning via ADAR1 and ADAR1+ADAR2.

[0082] FIG. 71A-71B depict selection of two exemplary LRRK2 guide RNAs designed through machine learning for further engineering.

[0083] FIG. 72 shows a plot of editing specificity of LRRK2 exhaustive guide RNAs designed through machine learning via ADAR1, ADAR2, or ADAR1+ADAR2.

[0084] FIG. 73 shows exemplary LRRK2 exhaustive guide RNAs designed through machine learning that display specificity for ADAR2.

[0085] FIGS. 74A and 74B show the top performing guide RNAs that display specificity for ADAR1+ADAR2.

[0086] FIGS. 75A and 75B show the top performing guide RNAs that display specificity for ADAR2.

[0087] FIGS. 76A and 76B show the top performing guide RNAs that display specificity for ADAR1.

[0088] FIG. 77 depicts a comparison between ML-derived gRNAs and gRNAs generated using in vitro high throughput screening (HTS) methods.

[0089] FIG. 78 depicts an overview of the engineering of guide RNAs produced from high-throughput screening.

[0090] FIGS. 79A and 79B depict cell-free and in-cell editing of exemplary LRRK2 guide610 without a barbell macro-footprint (FIG. 79A) and with a barbell macro-footprint (FIG. 79B) via ADAR.

[0091] FIGS. 80A-80C show engineering of the macro-footprint position for an exemplary guide610 targeting LRRK2. FIG. 80A shows tiling of the macro-footprint positioning for the exemplary guide with respect to the A/C mismatch, and how this tiling affects editing via ADAR1 and ADAR1+ADAR2. FIG. 80B shows the percent editing for the guide variants via ADAR1. FIG. 80C shows the percent editing for the guide variants via ADAR1+ADAR2.

[0092] FIGS. 81A-81C show engineering of right barbell coordinates for an exemplary guide610 targeting LRRK2. As shown in FIG. 81A, the coordinate of the right barbell was tiled between the following coordinates with respect to the A/C mismatch: +22. +23, +24, +25, +26, +28, +30, +32, and +34, and the effect of each position on ADAR1 and ADAR1+ADAR2 editing was determined. FIG. 81B shows the percent editing for the exemplary guide variants via ADAR1. FIG. 81C shows the percent editing for the exemplary guide variants via ADAR1+ADAR2.

[0093] FIGS. 82A and 82B show engineering of left barbell coordinates for an exemplary guide targeting LRRK2. As shown in FIG. 82A, the coordinate of the left barbell was tiled between the following coordinates with respect to the A/C mismatch: −10, −12, −14, −16, −18, −20, −22, and −24, and the effect of each position on ADAR1 and ADAR1+ADAR2 editing was determined. FIG. 82B shows the percent editing for the exemplary guide variants via ADAR1.

[0094] FIGS. 83A and 83B show engineering of guide length for an exemplary guide targeting LRRK2. FIG. 83A depicts the effect of guide length on ADAR1 and ADAR1+ADAR2 editing.

[0095] FIG. 83B shows the percent editing for the exemplary guide variants of varying length via ADAR1. The y-axis shows all candidate engineered guide RNAs tested and the x-axis shows the target sequence positions, with position 0 representing the target adenosine to be edited.

[0096] FIGS. 84A and 84B show in cell and cell-free editing of LRRK2 by exemplary guide RNA 2063 variants without a barbell (FIG. 84A) and having a barbell (FIG. 84B) via ADAR1 and ADAR1+ADAR2. The y-axis shows all candidate engineered guide RNAs tested and the x-axis shows the target sequence positions, with position 0 representing the target adenosine to be edited.

[0097] FIGS. 85A and 85B show in cell and cell-free editing of LRRK2 by exemplary guide RNA 1590 variants without a barbell (FIG. 85A) and having a barbell (FIG. 85B) via ADAR1 and ADAR1+ADAR2. The y-axis shows all candidate engineered guide RNAs tested and the x-axis shows the target sequence positions, with position 0 representing the target adenosine to be edited.

[0098] FIGS. 86A-86C show in cell and cell-free editing of LRRK2 by exemplary guide RNA 2397 variants without a barbell (FIG. 86A) and having a barbell (FIG. 86B and FIG. 86C) via ADAR1 and ADAR1+ADAR2. The y-axis shows all candidate engineered guide RNAs tested and the x-axis shows the target sequence positions, with position 0 representing the target adenosine to be edited.

[0099] FIGS. 87A-87C show engineering of the macro-footprint positioning for exemplary guide 2397 RNA variants. FIG. 87A depicts a summary of the RNA editing efficiencies for the exemplary guide 2397 RNA variants, while FIG. 87B and FIG. 87C depict the editing efficiency by position for each exemplary guide RNA via ADAR1 (FIG. 87B) and ADAR1+ADAR2 (FIG. 87C). The y-axis shows all candidate engineered guide RNAs tested and the x-axis shows the target sequence positions, with position 0 representing the target adenosine to be edited.

[0100] FIGS. 88A-88C show engineering of the right barbell coordinate for exemplary guide 2397 RNA variants. FIG. 88A depicts a summary of the RNA editing efficiencies for the exemplary guide 2397 RNA variants, while FIG. 88B and FIG. 88C depict the editing efficiency by position for each exemplary guide RNA via ADAR1 (FIG. 88B) and ADAR1+ADAR2 (FIG. 88C). The y-axis shows all candidate engineered guide RNAs tested and the x-axis shows the target sequence positions, with position 0 representing the target adenosine to be edited.

[0101] FIG. 89 depicts engineering of the left barbell coordinate for exemplary guide 2397 RNA variants.

[0102] FIGS. 90A and 90B show in cell and cell-free editing of LRRK2 by exemplary guide RNA 1321 variants without a barbell (FIG. 90A) and having a barbell (FIG. 90B) via ADAR1 and ADAR1+ADAR2. The y-axis shows all candidate engineered guide RNAs tested and the x-axis shows the target sequence positions, with position 0 representing the target adenosine to be edited.

[0103] FIGS. 91A and 91B show in cell and cell-free editing of LRRK2 by exemplary guide RNA 295 variants without a barbell (FIG. 91A) and having a barbell (FIG. 91B) via ADAR1 and ADAR1+ADAR2. The y-axis shows all candidate engineered guide RNAs tested and the x-axis shows the target sequence positions, with position 0 representing the target adenosine to be edited.

[0104] FIGS. 92A and 92B show in cell and cell-free editing of LRRK2 by exemplary guide RNA 730 variants without a barbell (FIG. 92A) and having a barbell (FIG. 92B) via ADAR1 and ADAR1+ADAR2. The y-axis shows all candidate engineered guide RNAs tested and the x-axis shows the target sequence positions, with position 0 representing the target adenosine to be edited.

[0105] FIGS. 93A and 93B show in cell and cell-free editing of LRRK2 by exemplary guide RNA 708 variants without a barbell (FIG. 93A) and having a barbell (FIG. 93B) via ADAR1 and ADAR1+ADAR2. The y-axis shows all candidate engineered guide RNAs tested and the x-axis shows the target sequence positions, with position 0 representing the target adenosine to be edited.

[0106] FIGS. 94A and 94B show in cell and cell-free editing of LRRK2 by exemplary guide RNA 351 variants without a barbell (FIG. 94A) and having a barbell (FIG. 94B) via ADAR1 and ADAR1+ADAR2. The y-axis shows all candidate engineered guide RNAs tested and the x-axis shows the target sequence positions, with position 0 representing the target adenosine to be edited.

[0107] FIGS. 95A and 95B show in cell and cell-free editing of LRRK2 by exemplary guide RNA 1326 variants without a barbell (FIG. 95A) and having a barbell (FIG. 95B) via ADAR1 and ADAR1+ADAR2. The y-axis shows all candidate engineered guide RNAs tested and the x-axis shows the target sequence positions, with position 0 representing the target adenosine to be edited.

[0108] FIGS. 96A-960 show in cell and cell-free editing of LRRK2 by exemplary guide RNA 871 variants without a barbell (FIG. 96A) and having barbells (FIG. 96B-FIG. 960) via ADAR1 and ADAR1+ADAR2. The y-axis shows all candidate engineered guide RNAs tested and the x-axis shows the target sequence positions, with position 0 representing the target adenosine to be edited.

[0109] FIGS. 97A-97C show engineering of the macro-footprint positioning for exemplary guide 871 RNA variants. FIG. 97A depicts a summary of the RNA editing efficiencies for the exemplary guide 871 RNA variants, while FIG. 97B and FIG. 97C depict the editing efficiency by position for each exemplary guide RNA via ADAR1 (FIG. 97B) and ADAR1+ADAR2 (FIG. 97C). The y-axis shows all candidate engineered guide RNAs tested and the x-axis shows the target sequence positions, with position 0 representing the target adenosine to be edited.

[0110] FIGS. 98A-98C show engineering of the right barbell coordinate for exemplary guide 871 RNA variants. FIG. 98A depicts a summary of the RNA editing efficiencies for the exemplary guide 871 RNA variants, while FIG. 98B and FIG. 98C depict the editing efficiency by position for each exemplary guide RNA via ADAR1 (FIG. 98B) and ADAR1+ADAR2 (FIG. 98C). The y-axis shows all candidate engineered guide RNAs tested and the x-axis shows the target sequence positions, with position 0 representing the target adenosine to be edited.

[0111] FIGS. 99A-99C show engineering of the left barbell coordinate for exemplary guide 871 RNA variants. FIG. 99A depicts a summary of the RNA editing efficiencies for the exemplary guide 871 RNA variants, while FIG. 99B and FIG. 99C depict the editing efficiency by position for each exemplary guide RNA via ADAR1 (FIG. 99B) and ADAR1+ADAR2 (FIG. 99C). The y-axis shows all candidate engineered guide RNAs tested and the x-axis shows the target sequence positions, with position 0 representing the target adenosine to be edited.

[0112] FIGS. 100A-100C show engineering of the guide length for exemplary guide 871 RNA variants. FIG. 100A depicts a summary of the RNA editing efficiencies for the exemplary guide 871 RNA variants, while FIG. 100B and FIG. 100C depict the editing efficiency by position for each exemplary guide RNA via ADAR1 (FIG. 100B) and ADAR1+ADAR2 (FIG. 100C). The y-axis shows all candidate engineered guide RNAs tested and the x-axis shows the target sequence positions, with position 0 representing the target adenosine to be edited.

[0113] FIGS. 101A-11T show in cell and cell-free editing of LRRK2 by exemplary guide RNA 919 variants. FIG. 101A provides a summary of the in cell editing data for the exemplary guide 919 variants via ADAR1 and ADAR1+ADAR2. FIG. 101B-FIG. 101T depict the editing efficiency by position for each exemplary guide 919 RNA via ADAR1 and ADAR1+ADAR2. The y-axis shows all candidate engineered guide RNAs tested and the x-axis shows the target sequence positions, with position 0 representing the target adenosine to be edited.

[0114] FIGS. 102A-102C show engineering of the macro-footprint positioning for exemplary guide 919 RNA variants. FIG. 102A depicts a summary of the RNA editing efficiencies for the exemplary guide 919 RNA variants, while FIG. 102B and FIG. 102C depict the editing efficiency by position for each exemplary guide RNA via ADAR1 (FIG. 102B) and ADAR1+ADAR2 (FIG. 102C). The y-axis shows all candidate engineered guide RNAs tested and the x-axis shows the target sequence positions, with position 0 representing the target adenosine to be edited.

[0115] FIGS. 103A-103C show engineering of the right barbell coordinate for exemplary guide 919 RNA variants. FIG. 103A depicts a summary of the RNA editing efficiencies for the exemplary guide 919 RNA variants, while FIG. 103B and FIG. 103C depict the editing efficiency by position for each exemplary guide RNA via ADAR1 (FIG. 103B) and ADAR1+ADAR2 (FIG. 103C). The y-axis shows all candidate engineered guide RNAs tested and the x-axis shows the target sequence positions, with position 0 representing the target adenosine to be edited.

[0116] FIGS. 104A-104C show engineering of the left barbell coordinate for exemplary guide 919 RNA variants. FIG. 104A depicts a summary of the RNA editing efficiencies for the exemplary guide 919 RNA variants, while FIG. 104B and FIG. 104C depict the editing efficiency by position for each exemplary guide RNA via ADAR1 (FIG. 104B) and ADAR1+ADAR2 (FIG. 104C). The y-axis shows all candidate engineered guide RNAs tested and the x-axis shows the target sequence positions, with position 0 representing the target adenosine to be edited.

[0117] FIGS. 105A-105C show engineering of the guide length for exemplary guide 919 RNA variants. FIG. 105A depicts a summary of the RNA editing efficiencies for the exemplary guide 919 RNA variants, while FIG. 105B and FIG. 105C depict the editing efficiency by position for each exemplary guide RNA via ADAR1 (FIG. 105B) and ADAR1+ADAR2 (FIG. 105C). The y-axis shows all candidate engineered guide RNAs tested and the x-axis shows the target sequence positions, with position 0 representing the target adenosine to be edited.

[0118] FIGS. 106A-106C show in cell and cell-free editing of LRRK2 by exemplary guide RNA 844 variants via ADAR1 and ADAR1+ADAR2. The y-axis shows all candidate engineered guide RNAs tested and the x-axis shows the target sequence positions, with position 0 representing the target adenosine to be edited.

[0119] FIGS. 107A-107C show in cell and cell-free editing of LRRK2 by exemplary guide RNA 1976 variants via ADAR1 and ADAR1+ADAR2. The y-axis shows all candidate engineered guide RNAs tested and the x-axis shows the target sequence positions, with position 0 representing the target adenosine to be edited.

[0120] FIGS. 108A-108C show engineering of the macro-footprint positioning for exemplary guide 1976 RNA variants. FIG. 108A depicts a summary of the RNA editing efficiencies for the exemplary guide 1976 RNA variants, while FIG. 108B and FIG. 108C depict the editing efficiency by position for each exemplary guide RNA via ADAR1 (FIG. 108B) and ADAR1+ADAR2 (FIG. 108C). The y-axis shows all candidate engineered guide RNAs tested and the x-axis shows the target sequence positions, with position 0 representing the target adenosine to be edited.

[0121] FIGS. 109A-109C show engineering of the right barbell coordinate for exemplary guide 1976 RNA variants. FIG. 109A depicts a summary of the RNA editing efficiencies for the exemplary guide 1976 RNA variants, while FIG. 109B and FIG. 109C depict the editing efficiency by position for each exemplary guide RNA via ADAR1 (FIG. 109B) and ADAR1+ADAR2 (FIG. 109C). The y-axis shows all candidate engineered guide RNAs tested and the x-axis shows the target sequence positions, with position 0 representing the target adenosine to be edited.

[0122] FIG. 110 depicts engineering of the left barbell coordinate for exemplary guide 1976 RNA variants.

[0123] FIG. 111 shows in cell and cell-free editing of LRRK2 by an exemplary guide RNA 1700. The y-axis shows all candidate engineered guide RNAs tested and the x-axis shows the target sequence positions, with position 0 representing the target adenosine to be edited.

[0124] FIGS. 112A-112E show in cell and cell-free editing of LRRK2 by exemplary guide RNA 860 variants. The y-axis shows all candidate engineered guide RNAs tested and the x-axis shows the target sequence positions, with position 0 representing the target adenosine to be edited.

[0125] FIG. 113 shows in cell and cell-free editing of LRRK2 by an exemplary guide RNA 2108. The y-axis shows all candidate engineered guide RNAs tested and the x-axis shows the target sequence positions, with position 0 representing the target adenosine to be edited.

[0126] FIG. 114 depicts a comparison of editing efficiency between exemplary guide RNA variants targeting LRRK2.

[0127] FIG. 115 depicts an scAAV vector map for in vitro screening of LRRK2 guide RNA variant produced herein when expressed in an AAV vector.

[0128] FIGS. 116A and 116B depict editing efficiencies of exemplary LRRK2 guide provided herein when transfected as an scAAV vector plasmid (FIG. 116A) or transduced as an scAAVDJ virus (FIG. 116B) via ADAR.

[0129] FIGS. 117A and 117B depict editing of ABCA4 mRNA using exemplary guide RNAs as described here via ADAR.

[0130] FIG. 118 illustrates an exemplary guide RNA capable of facilitating ADAR-mediated editing of a target adenosine in an ABCA4 mRNA having a 5′G next to the target adenosine.

[0131] FIG. 119 depicts tiling of the position of the barbell macro-footprint along the guide-target RNA scaffold to identify those engineered guide RNAs that facilitate the highest level of SERPINA1 editing.

[0132] FIG. 120 shows design of the right and left barbell coordinates, as well as engineering of guide length for the exemplary engineered guide 06566 RNA.

[0133] FIG. 121 depicts in cell ADAR-mediated editing of exemplary engineered guide RNAs targeting SERPINA1 using a GFP editing reporting screen. The y-axis shows all candidate engineered guide RNAs tested and the x-axis shows the target sequence positions, with position 0 representing the target adenosine to be edited.

[0134] FIG. 122 depicts the ADAR-mediated editing efficiency for an exemplary engineered guide SERP-AC-AA_95-50_-10_25 targeting SERPINA1.

[0135] FIG. 123 depicts the ADAR-mediated editing efficiency for an exemplary engineered guide SERP-AC-AA_95-50_-8_28 targeting SERPINA1.

[0136] FIG. 124 depicts the ADAR-mediated editing efficiency for an exemplary engineered guide SERP-AC-AA_95-50_-10_26 targeting SERPINA1.

[0137] FIG. 125 depicts the ADAR-mediated editing efficiency for an exemplary engineered guide SERP-100.50-position_-20 adenosine scan control targeting SERPINA1.

[0138] FIG. 126 depicts the ADAR1-mediated editing efficiency for an AAV vector encoding an exemplary engineered guide targeting ABCA4 G1961E in human cells.

[0139] FIG. 127 depicts a workflow for screening exemplary guide RNAs targeting LRRK2 in a broken GFP reporter system.

[0140] FIG. 128 depicts the editing efficiency of the exemplary guides targeting LRRK2 in the broken GFP reporter system via exogenous or endogenous ADAR.

[0141] FIG. 129 shows the change in body weight for subjects administered an AAV vector encoding an exemplary engineered guide RNA targeting SERPINA1 and control vector over the course of the 28 day study.

[0142] FIG. 130 illustrates transduction of an engineered guide RNA payload in the liver after administration of an AAV vector encoding an exemplary engineered guide RNA targeting SERPINA1 and control vector, as measured by expression of an mCherry reporter.

[0143] FIG. 131 depicts normalized quantitation of an engineered guide RNA after administration of an AAV vector encoding an exemplary engineered guide RNA targeting SERPINA1 and control vector.

[0144] FIG. 132 depicts quantitation of the amount of target adenosine editing of a SERPINA1 RNA via ADAR through administration of an AAV vector encoding an engineered guide RNA targeting SERPINA1, as compared to the level of editing of the control AAV vector.

[0145] FIG. 133 provides a comparison between linear and circularized versions of exemplary guide RNAs targeting LRRK2.

[0146] FIG. 134A-FIG. 134B depict engineering of the length of circularized LRRK2 guide RNAs by increasing the length of the circularized guide RNA by an additional 15 nucleotides (FIG. 134A), 30 nucleotides (FIG. 134A), and 100 nucleotides (FIG. 134B).

[0147] FIG. 135 depicts the effect of deletion of selected uridines from an engineered circularized guide RNA targeting LRRK2 on editing of a target LRRK2 RNA.

[0148] FIG. 136A-FIG. 136D illustrate the in vivo editing of a target LRRK2 RNA upon administration of an scAAV vector encoding an engineered guide RNA targeting LRRK2. FIG. 136A and FIG. 136C depict the in vivo editing efficiencies for the scAAV vector encoding the engineered guide RNA targeting LRRK2, as measured in the brain (FIG. 136A) and liver (FIG. 136C). FIG. 136B and FIG. 136D illustrate quantitation of engineered guide RNA expression, as compared to expression of the GAPDH control, in the brain (FIG. 136B) and liver (FIG. 136D).

[0149] FIG. 137 shows results of a library screen of SERPINA1 targeting guides. The ADAR1 fraction edited is depicted on the Y-axis and the specificity score is depicted on the X-axis.

### DETAILED DESCRIPTION

Engineered Guides with Barbell Macro-Footprints

[0150] Disclosed herein are engineered guide RNAs for site-specific editing of an adenosine of a target RNA via an adenosine deaminase enzyme. Engineered guide RNAs of the present disclosure comprise a micro-footprint sequence and a barbell macro-footprint sequence that each comprise latent structures, such that when the engineered guide RNA is hybridized to the target RNA, the latent structures manifest. A latent structure, when manifested, produces at least one structural feature selected from the group consisting of: a bulge, an internal loop, a mismatch, a hairpin, and any combination thereof. In some embodiments, the engineered guide RNA of the disclosure, upon hybridization of the engineered guide RNA and the sequence of the target RNA form a guide-target RNA scaffold, comprising (i) a region that comprises at least one structural feature; and (ii) a first internal loop (also referred to as a “left bell” or “LB”) and a second internal loop (also referred to as a “right bell” or “RB”) that flank opposing ends of the region of the guide-target RNA scaffold, where the engineered guide RNA facilitates an increase in the amount of the targeted edit of the adenosine of the target RNA via the adenosine deaminase enzyme RNA editing entity, relative to an otherwise comparable engineered guide RNA lacking the first internal loop and the second internal loop.

[0151] As described herein, a “micro-footprint” sequence refers to a sequence with latent structures that, when manifested, facilitate editing of the adenosine of a target RNA via an adenosine deaminase enzyme. A macro-footprint can serve to guide an RNA editing entity (e.g., ADAR) and direct its activity towards a micro-footprint. In some embodiments, included within the micro-footprint sequence is a nucleotide that is positioned such that, when the guide RNA is hybridized to the target RNA, the nucleotide opposes the adenosine to be edited by the adenosine deaminase and does not base pair with the adenosine to be edited. This nucleotide is referred to herein as the “mismatched position” or “mismatch” and can be a cytosine. Micro-footprint sequences as described herein have upon hybridization of the engineered guide RNA and target RNA, at least one structural feature selected from the group consisting of: a bulge, an internal loop, a mismatch, a hairpin, and any combination thereof. Engineered guide RNAs with superior micro-footprint sequences can be selected based on their ability to facilitate editing of a specific target RNA. Engineered guide RNAs selected for their ability to facilitate editing of a specific target are capable of adopting various micro-footprint latent structures, which can vary on a target-by-target basis.

[0152] Guide RNAs of the present disclosure further comprise a macro-footprint. In some embodiments, the macro-footprint comprises a barbell macro-footprint. A micro-footprint can serve to guide an RNA editing enzyme and direct its activity towards the target adenosine to be edited. A “barbell” as described herein refers to a pair of internal loop latent structures that manifest upon hybridization of the guide RNA to the target RNA. In some embodiments, each internal loop is positioned towards the 5′ end or the 3′ end of the guide-target RNA scaffold formed upon hybridization of the guide RNA and the target RNA. In some embodiments, each internal loop flanks opposing sides of the micro-footprint sequence. Insertion of a barbell macro-footprint sequence flanking opposing sides of the micro-footprint sequence, upon hybridization of the guide RNA to the target RNA, results in formation of barbell internal loops on opposing sides of the micro-footprint, which in turn comprises at least one structural feature that facilitates editing of a specific target RNA.

[0153] The present disclosure demonstrates that the presence of barbells flanking the micro-footprint can improve one or more aspects of editing. For example, the presence of a barbell macro-footprint in addition to a micro-footprint can result in a higher amount of on target adenosine editing, relative to an otherwise comparable guide RNA lacking the barbells. Additionally, and or alternatively, the presence of a barbell macro-footprint in addition to a micro-footprint can result in a lower amount of local off-target adenosine editing, relative to an otherwise comparable guide RNA lacking the barbells. Further, while the effect of various micro-footprint structural features can vary on a target-by-target basis based on selection in a high throughput screen, the present disclosure demonstrates that the increase in the one or more aspects of editing provided by the barbell macro-footprint structures is independent of the particular target RNA. Thus, the present disclosure provides a facile method of improving editing of guide RNAs previously selected to facilitate editing of a target RNA of interest. For example, the barbell macro-footprint and the micro-footprint of the disclosure can provide an increased amount of on target adenosine editing relative to an otherwise comparable guide RNA lacking the barbells. In other embodiments, the presence of the barbell macro-footprint in addition to the micro-footprint described here can result in a lower amount of local off-target adenosine editing, relative to an otherwise comparable guide RNA, upon hybridization of the guide RNA and target RNA to form a guide-target RNA scaffold lacking the barbells.

[0154] A macro-footprint of the present disclosure, such as a barbell macro-footprint, can be comprised in an engineered guide RNA designed to target any number of target RNAs. Target RNAs encompassed by the present disclosure include, but are not limited to, ABCA4, APP, CFTR, DMPK, DUX4, GAPDH, GBA, GRN, HEXA, LIPA, LRRK2, MAPT, PINK1, PMP22, RAB7A, SERPINA1, SNCA, SOD1, a fragment of any one of these, or any combination thereof.

### Engineered Guide RNAS

[0155] Provided herein are engineered guide RNAs (and engineered polynucleotides encoding an engineered guide RNA of the present disclosure) comprising a micro-footprint sequence and a barbell macro-footprint sequence for site-specific editing of a target RNA via an adenosine deaminase enzyme. As used herein, the term “engineered” in reference to a guide RNA or polynucleotide encoding the same refers to a non-naturally occurring guide RNA or polynucleotide encoding the same. An engineered guide RNA as disclosed herein comprises a targeting domain with complementarity to a target RNA, where hybridization of the targeting domain of the engineered guide RNA to the target RNA produces latent structures in a guide-target RNA scaffold that manifest upon hybridization into structural features as described herein. A “guide-target RNA scaffold” as described herein can also be referred to as a “double stranded RNA substrate.” As disclosed herein, inclusion of a barbell macro-footprint sequence in the targeting domain to produce a pair of internal loop structural features flanking the micro-footprint sequence improves one or more aspects of editing, as compared to an otherwise comparable guide RNA lacking the barbell macro-footprint sequence (and hence the pair of internal loop structural features).

### Barbell Macro-Footprints

[0156] Disclosed herein are barbell macro-footprint sequences that, upon hybridization to a target RNA, produce a pair of internal loop structural features, where the presence of the internal loop structural features improves one or more aspects of editing, as compared to an otherwise comparable guide RNA lacking the pair of internal loop structural features. In some instances, inclusion of a barbell macro-footprint sequence improves an amount of editing of an adenosine of interest (e.g., an on-target adenosine), relative to an amount of editing of on-target adenosine in a comparable guide RNA lacking the barbell macro-footprint sequence. In some instances, inclusion of a barbell macro-footprint sequence decreases an amount of editing of adenosines other than the adenosine of interest (e.g., decreases off-target adenosine), relative to an amount of off-target adenosine in a comparable guide RNA lacking the barbell macro-footprint sequence.

[0157] As disclosed herein, a “macro-footprint” sequence can be positioned such that it flanks a micro-footprint sequence. Further, while a macro-footprint sequence can flank a micro-footprint sequence, additional latent structures can be incorporated that flank either end of the macro-footprint as well. In some embodiments, such additional latent structures are included as part of the macro-footprint. In some embodiments, such additional latent structures are separate, distinct, or both separate and distinct from the macro-footprint.

[0158] In some embodiments, a macro-footprint sequence can comprise a barbell macro-footprint sequence comprising latent structures that, when manifested, produce a first internal loop and a second internal loop.

[0159] In some examples, a first internal loop is positioned “near the 5′ end of the guide-target RNA scaffold” and a second internal loop is positioned near the 3′ end of the guide-target RNA scaffold. The length of the dsRNA comprises a 5′ end and a 3′ end, where up to half of the length of the guide-target RNA scaffold at the 5′ end can be considered to be “near the 5′ end” while up to half of the length of the guide-target RNA scaffold at the 3′ end can be considered “near the 3′ end.” Non-limiting examples of the 5′ end can include about 50% or less of the total length of the dsRNA at the 5′ end, about 45%, about 40%, about 35%, about 30%, about 25%, about 20%, about 15%, about 10%, or about 5%. Non-limiting examples of the 3′ end can include about 50% or less of the total length of the dsRNA at the 3′ end about 45%, about 40%, about 35%, about 30%, about 25%, about 20%, about 15%, about 10%, or about 5%.

[0160] The engineered guide RNAs of the disclosure comprising a barbell macro-footprint sequence (that manifests as a first internal loop and a second internal loop) can improve RNA editing efficiency, increase the amount or percentage of RNA editing generally, as well as for on-target nucleotide editing, such as on-target adenosine. In some embodiments, the engineered guide RNAs of the disclosure comprising a first internal loop and a second internal loop can also facilitate a decrease in the amount of or reduce off-target nucleotide editing, such as off-target adenosine or unintended adenosine editing. The decrease or reduction in some examples can be of the number of off-target edits or the percentage of off-target edits.

[0161] Each of the first and second internal loops of the barbell macro-footprint can independently be symmetrical or asymmetrical, where symmetry is determined by the number of bases or nucleotides of the engineered guide RNA and the number of bases or nucleotides of the target RNA, that together form each of the first and second internal loops.

[0162] As described herein, a double stranded RNA (dsRNA) substrate (e.g., a guide-target RNA scaffold) is formed upon hybridization of an engineered guide RNA of the present disclosure to a target RNA. An internal loop can be a symmetrical internal loop or an asymmetrical internal loop. A “symmetrical internal loop” is formed when the same number of nucleotides is present on each side of the internal loop. For example, a symmetrical internal loop in a guide-target RNA scaffold of the present disclosure can have the same number of nucleotides on the engineered guide RNA side and the target RNA side of the guide-target RNA scaffold. A symmetric internal loop of the present disclosure can be designated as a 5/5, 6/6, 7/7, 8/8, 9/9, 10/10, 11/11, 12/12, 13/13, 14/14, 15/15, 16/16, 17/17, 18/18, 19/19, 20/20, etc. symmetric internal loop, where the first number is the number of nucleotides contributed to the symmetric internal loop from the engineered guide RNA side of the guide-target RNA scaffold and the second number is the number of nucleotides contributed to the symmetric internal loop from the target RNA side of the guide-target RNA scaffold. A symmetrical internal loop of the present disclosure can be formed by 5 nucleotides on the engineered guide RNA side of the guide-target RNA scaffold target and 5 nucleotides on the target RNA side of the guide-target RNA scaffold. A symmetrical internal loop of the present disclosure can be formed by 6 nucleotides on the engineered guide RNA side of the guide-target RNA scaffold target and 6 nucleotides on the target RNA side of the guide-target RNA scaffold. A symmetrical internal loop of the present disclosure can be formed by 7 nucleotides on the engineered guide RNA side of the guide-target RNA scaffold target and 7 nucleotides on the target RNA side of the guide-target RNA scaffold. A symmetrical internal loop of the present disclosure can be formed by 8 nucleotides on the engineered guide RNA side of the guide-target RNA scaffold target and 8 nucleotides on the target RNA side of the guide-target RNA scaffold. A symmetrical internal loop of the present disclosure can be formed by 9 nucleotides on the engineered guide RNA side of the guide-target RNA scaffold target and 9 nucleotides on the target RNA side of the guide-target RNA scaffold. A symmetrical internal loop of the present disclosure can be formed by 10 nucleotides on the engineered guide RNA side of the guide-target RNA scaffold target and 10 nucleotides on the target RNA side of the guide-target RNA scaffold. A symmetrical internal loop of the present disclosure can be formed by 15 nucleotides on the engineered polynucleotide side of the guide-target RNA scaffold target and 15 nucleotides on the target RNA side of the guide-target RNA scaffold. A symmetrical internal loop of the present disclosure can be formed by 20 nucleotides on the engineered polynucleotide side of the guide-target RNA scaffold target and 20 nucleotides on the target RNA side of the guide-target RNA scaffold. A symmetrical internal loop of the present disclosure can be formed by 30 nucleotides on the engineered polynucleotide side of the guide-target RNA scaffold target and 30 nucleotides on the target RNA side of the guide-target RNA scaffold. A symmetrical internal loop of the present disclosure can be formed by 40 nucleotides on the engineered polynucleotide side of the guide-target RNA scaffold target and 40 nucleotides on the target RNA side of the guide-target RNA scaffold. A symmetrical internal loop of the present disclosure can be formed by 50 nucleotides on the engineered polynucleotide side of the guide-target RNA scaffold target and 50 nucleotides on the target RNA side of the guide-target RNA scaffold. A symmetrical internal loop of the present disclosure can be formed by 60 nucleotides on the engineered polynucleotide side of the guide-target RNA scaffold target and 60 nucleotides on the target RNA side of the guide-target RNA scaffold. A symmetrical internal loop of the present disclosure can be formed by 70 nucleotides on the engineered polynucleotide side of the guide-target RNA scaffold target and 70 nucleotides on the target RNA side of the guide-target RNA scaffold. A symmetrical internal loop of the present disclosure can be formed by 80 nucleotides on the engineered polynucleotide side of the guide-target RNA scaffold target and 80 nucleotides on the target RNA side of the guide-target RNA scaffold. A symmetrical internal loop of the present disclosure can be formed by 90 nucleotides on the engineered polynucleotide side of the guide-target RNA scaffold target and 90 nucleotides on the target RNA side of the guide-target RNA scaffold. A symmetrical internal loop of the present disclosure can be formed by 100 nucleotides on the engineered polynucleotide side of the guide-target RNA scaffold target and 100 nucleotides on the target RNA side of the guide-target RNA scaffold. A symmetrical internal loop of the present disclosure can be formed by 110 nucleotides on the engineered polynucleotide side of the guide-target RNA scaffold target and 110 nucleotides on the target RNA side of the guide-target RNA scaffold. A symmetrical internal loop of the present disclosure can be formed by 120 nucleotides on the engineered polynucleotide side of the guide-target RNA scaffold target and 120 nucleotides on the target RNA side of the guide-target RNA scaffold. A symmetrical internal loop of the present disclosure can be formed by 130 nucleotides on the engineered polynucleotide side of the guide-target RNA scaffold target and 130 nucleotides on the target RNA side of the guide-target RNA scaffold. A symmetrical internal loop of the present disclosure can be formed by 140 nucleotides on the engineered polynucleotide side of the guide-target RNA scaffold target and 140 nucleotides on the target RNA side of the guide-target RNA scaffold. A symmetrical internal loop of the present disclosure can be formed by 150 nucleotides on the engineered polynucleotide side of the guide-target RNA scaffold target and 150 nucleotides on the target RNA side of the guide-target RNA scaffold. A symmetrical internal loop of the present disclosure can be formed by 200 nucleotides on the engineered polynucleotide side of the guide-target RNA scaffold target and 200 nucleotides on the target RNA side of the guide-target RNA scaffold. A symmetrical internal loop of the present disclosure can be formed by 250 nucleotides on the engineered polynucleotide side of the guide-target RNA scaffold target and 250 nucleotides on the target RNA side of the guide-target RNA scaffold. A symmetrical internal loop of the present disclosure can be formed by 300 nucleotides on the engineered polynucleotide side of the guide-target RNA scaffold target and 300 nucleotides on the target RNA side of the guide-target RNA scaffold. A symmetrical internal loop of the present disclosure can be formed by 350 nucleotides on the engineered polynucleotide side of the guide-target RNA scaffold target and 350 nucleotides on the target RNA side of the guide-target RNA scaffold. A symmetrical internal loop of the present disclosure can be formed by 400 nucleotides on the engineered polynucleotide side of the guide-target RNA scaffold target and 400 nucleotides on the target RNA side of the guide-target RNA scaffold. A symmetrical internal loop of the present disclosure can be formed by 450 nucleotides on the engineered polynucleotide side of the guide-target RNA scaffold target and 450 nucleotides on the target RNA side of the guide-target RNA scaffold. A symmetrical internal loop of the present disclosure can be formed by 500 nucleotides on the engineered polynucleotide side of the guide-target RNA scaffold target and 500 nucleotides on the target RNA side of the guide-target RNA scaffold. A symmetrical internal loop of the present disclosure can be formed by 600 nucleotides on the engineered polynucleotide side of the guide-target RNA scaffold target and 600 nucleotides on the target RNA side of the guide-target RNA scaffold. A symmetrical internal loop of the present disclosure can be formed by 700 nucleotides on the engineered polynucleotide side of the guide-target RNA scaffold target and 700 nucleotides on the target RNA side of the guide-target RNA scaffold. A symmetrical internal loop of the present disclosure can be formed by 800 nucleotides on the engineered polynucleotide side of the guide-target RNA scaffold target and 800 nucleotides on the target RNA side of the guide-target RNA scaffold. A symmetrical internal loop of the present disclosure can be formed by 900 nucleotides on the engineered polynucleotide side of the guide-target RNA scaffold target and 900 nucleotides on the target RNA side of the guide-target RNA scaffold. A symmetrical internal loop of the present disclosure can be formed by 1000 nucleotides on the engineered polynucleotide side of the guide-target RNA scaffold target and 1000 nucleotides on the target RNA side of the guide-target RNA scaffold. Thus, a symmetrical internal loop can be a structural feature formed from latent structure provided by an engineered latent guide RNA.

[0163] As described herein, a double stranded RNA (dsRNA) substrate (e.g., a guide-target RNA scaffold) is formed upon hybridization of an engineered guide RNA of the present disclosure to a target RNA. An internal loop can be a symmetrical internal loop or an asymmetrical internal loop. An “asymmetrical internal loop” is formed when a different number of nucleotides is present on each side of the internal loop. For example, an asymmetrical internal loop in a guide-target RNA scaffold of the present disclosure can have different numbers of nucleotides on the engineered guide RNA side and the target RNA side of the guide-target RNA scaffold.

[0164] An asymmetric internal loop of the present disclosure can be designated as a 5/6, 5/7, 5/8, 5/9, 5/10, 5/11, 5/12, 5/13, 5/14, 5/15, 5/16, 5/17, 5/18, 5/19, 5/20, 6/5, 6/7, 6/8, 6/9, 6/10, 6/11, 6/12, 6/13, 6/14, 6/15, 6/16, 6/17, 6/18, 6/19, 6/20, 7/5, 7/6, 7/8, 7/9, 7/10, 7/11, 7/12, 7/13, 7/14, 7/15, 7/16, 7/17, 7/18, 7/19, 7/20, 8/5, 8/6, 8/7, 8/9, 8/10, 8/11, 8/12, 8/13, 8/14, 8/15, 8/16, 8/17, 8/18, 8/19, 8/20, 9/5, 9/6, 9/7, 9/8, 9/10, 9/11, 9/12, 9/13, 9/14, 9/15, 9/16, 9/17, 9/18, 9/19, 9/20, 10/5, 10/6, 10/7, 10/8, 10/9, 10/11, 10/12, 10/13, 10/14, 10/15, 10/16, 10/17, 10/18, 10/19, 10/20, 11/5, 11/6, 11/7, 11/8, 11/9, 11/10, 11/12, 11/13, 11/14, 11/15, 11/16, 11/17, 11/18, 11/19, 11/20, 12/5, 12/6, 12/7, 12/8, 12/9, 12/10, 12/11, 12/13, 12/14, 12/15, 12/16, 12/17, 12/18, 12/19, 12/20, 13/5, 13/6, 13/7, 13/8, 13/9, 13/10, 13/11, 13/12, 13/14, 13/15, 13/16, 13/17, 13/18, 13/19, 13/20, 14/5, 14/6, 14/7, 14/8, 14/9, 14/10, 14/11, 14/12, 14/13, 14/15, 14/16, 14/17, 14/18, 14/19, 14/20, 15/5, 15/6, 15/7, 15/8, 15/9, 15/10, 15/11, 15/12, 15/13, 15/14, 15/16, 15/17, 15/18, 15/19, 15/20, 16/5, 16/6, 16/7, 16/8, 16/9, 16/10, 16/11, 16/12, 16/13, 16/14, 16/15, 16/17, 16/18, 16/19, 16/20, 17/5, 17/6, 17/7, 17/8, 17/9, 17/10, 17/11, 17/12, 17/13, 17/14, 17/15, 17/16, 17/18, 17/19, 17/20, 18/5, 18/6, 18/7, 18/8, 18/9, 18/10, 18/11, 18/12, 18/13, 18/14, 18/15, 18/16, 18/17, 18/19, 18/20, 19/5, 19/6, 19/7, 19/8, 19/9, 19/10, 19/11, 19/12, 19/13, 19/14, 19/15, 19/16, 19/17, 19/18, 19/20, 20/5, 20/6, 20/7, 20/8, 20/9, 20/10, 20/11, 20/12, 20/13, 20/14, 20/15, 20/16, 20/17, 20/18, 20/19, etc, asymmetric internal loop, the first number is the number of nucleotides contributed to the asymmetric internal loop from the engineered guide RNA side of the guide-target RNA scaffold and the second number is the number of nucleotides contributed to the asymmetric internal loop from the target RNA side of the guide-target RNA scaffold. An asymmetrical internal loop of the present disclosure can be formed by from 5 to 150 nucleotides on the engineered polynucleotide side of the guide-target RNA scaffold and from 5 to 150 nucleotides on the target RNA side of the guide-target RNA scaffold, wherein the number of nucleotides is the different on the engineered side of the guide-target RNA scaffold target than the number of nucleotides on the target RNA side of the guide-target RNA scaffold. An asymmetrical internal loop of the present disclosure can be formed by from 5 to 1000 nucleotides on the engineered polynucleotide side of the guide-target RNA scaffold and from 5 to 1000 nucleotides on the target RNA side of the guide-target RNA scaffold, wherein the number of nucleotides is the different on the engineered side of the guide-target RNA scaffold target than the number of nucleotides on the target RNA side of the guide-target RNA scaffold. An asymmetrical internal loop of the present disclosure can be formed by 5 nucleotides on the engineered guide RNA side of the guide-target RNA scaffold and 6 nucleotides on the target RNA side of the guide-target RNA scaffold. An asymmetrical internal loop of the present disclosure can be formed by 5 nucleotides on the target RNA side of the guide-target RNA scaffold and 6 nucleotides on the engineered guide RNA side of the guide-target RNA scaffold. An asymmetrical internal loop of the present disclosure can be formed by 5 nucleotides on the engineered guide RNA side of the guide-target RNA scaffold and 7 nucleotides on the target RNA side of the guide-target RNA scaffold. An asymmetrical internal loop of the present disclosure can be formed by 5 nucleotides on the target RNA side of the guide-target RNA scaffold and 7 nucleotides on the engineered guide RNA side of the guide-target RNA scaffold. An asymmetrical internal loop of the present disclosure can be formed by 5 nucleotides on the engineered guide RNA side of the guide-target RNA scaffold and 8 nucleotides internal loop the target RNA side of the guide-target RNA scaffold. An asymmetrical internal loop of the present disclosure can be formed by 5 nucleotides on the target RNA side of the guide-target RNA scaffold and 8 nucleotides on the engineered guide RNA side of the guide-target RNA scaffold. An asymmetrical internal loop of the present disclosure can be formed by 5 nucleotides on the engineered guide RNA side of the guide-target RNA scaffold and 9 nucleotides internal loop the target RNA side of the guide-target RNA scaffold. An asymmetrical internal loop of the present disclosure can be formed by 5 nucleotides on the target RNA side of the guide-target RNA scaffold and 9 nucleotides on the engineered guide RNA side of the guide-target RNA scaffold. An asymmetrical internal loop of the present disclosure can be formed by 5 nucleotides on the engineered guide RNA side of the guide-target RNA scaffold and 10 nucleotides internal loop the target RNA side of the guide-target RNA scaffold. An asymmetrical internal loop of the present disclosure can be formed by 5 nucleotides on the target RNA side of the guide-target RNA scaffold and 10 nucleotides on the engineered guide RNA side of the guide-target RNA scaffold. An asymmetrical internal loop of the present disclosure can be formed by 6 nucleotides on the engineered guide RNA side of the guide-target RNA scaffold and 7 nucleotides internal loop the target RNA side of the guide-target RNA scaffold. An asymmetrical internal loop of the present disclosure can be formed by 6 nucleotides on the target RNA side of the guide-target RNA scaffold and 7 nucleotides on the engineered guide RNA side of the guide-target RNA scaffold. An asymmetrical internal loop of the present disclosure can be formed by 6 nucleotides on the engineered guide RNA side of the guide-target RNA scaffold and 8 nucleotides internal loop the target RNA side of the guide-target RNA scaffold. An asymmetrical internal loop of the present disclosure can be formed by 6 nucleotides on the target RNA side of the guide-target RNA scaffold and 8 nucleotides on the engineered guide RNA side of the guide-target RNA scaffold. An asymmetrical internal loop of the present disclosure can be formed by 6 nucleotides on the engineered guide RNA side of the guide-target RNA scaffold and 9 nucleotides internal loop the target RNA side of the guide-target RNA scaffold. An asymmetrical internal loop of the present disclosure can be formed by 6 nucleotides on the target RNA side of the guide-target RNA scaffold and 9 nucleotides on the engineered guide RNA side of the guide-target RNA scaffold. An asymmetrical internal loop of the present disclosure can be formed by 6 nucleotides on the engineered guide RNA side of the guide-target RNA scaffold and 10 nucleotides internal loop the target RNA side of the guide-target RNA scaffold. An asymmetrical internal loop of the present disclosure can be formed by 6 nucleotides on the target RNA side of the guide-target RNA scaffold and 10 nucleotides on the engineered guide RNA side of the guide-target RNA scaffold. An asymmetrical internal loop of the present disclosure can be formed by 7 nucleotides on the engineered guide RNA side of the guide-target RNA scaffold and 8 nucleotides internal loop the target RNA side of the guide-target RNA scaffold. An asymmetrical internal loop of the present disclosure can be formed by 7 nucleotides on the target RNA side of the guide-target RNA scaffold and 8 nucleotides on the engineered guide RNA side of the guide-target RNA scaffold. An asymmetrical internal loop of the present disclosure can be formed by 7 nucleotides on the engineered guide RNA side of the guide-target RNA scaffold and 9 nucleotides internal loop the target RNA side of the guide-target RNA scaffold. An asymmetrical internal loop of the present disclosure can be formed by 7 nucleotides on the target RNA side of the guide-target RNA scaffold and 9 nucleotides on the engineered guide RNA side of the guide-target RNA scaffold. An asymmetrical internal loop of the present disclosure can be formed by 7 nucleotides on the engineered guide RNA side of the guide-target RNA scaffold and 10 nucleotides internal loop the target RNA side of the guide-target RNA scaffold. An asymmetrical internal loop of the present disclosure can be formed by 7 nucleotides on the target RNA side of the guide-target RNA scaffold and 10 nucleotides on the engineered guide RNA side of the guide-target RNA scaffold. An asymmetrical internal loop of the present disclosure can be formed by 8 nucleotides on the engineered guide RNA side of the guide-target RNA scaffold and 9 nucleotides internal loop the target RNA side of the guide-target RNA scaffold. An asymmetrical internal loop of the present disclosure can be formed by 8 nucleotides on the target RNA side of the guide-target RNA scaffold and 9 nucleotides on the engineered guide RNA side of the guide-target RNA scaffold. An asymmetrical internal loop of the present disclosure can be formed by 8 nucleotides on the engineered guide RNA side of the guide-target RNA scaffold and 10 nucleotides internal loop the target RNA side of the guide-target RNA scaffold. An asymmetrical internal loop of the present disclosure can be formed by 8 nucleotides on the target RNA side of the guide-target RNA scaffold and 10 nucleotides on the engineered guide RNA side of the guide-target RNA scaffold. An asymmetrical internal loop of the present disclosure can be formed by 9 nucleotides on the engineered guide RNA side of the guide-target RNA scaffold and 10 nucleotides internal loop the target RNA side of the guide-target RNA scaffold. An asymmetrical internal loop of the present disclosure can be formed by 9 nucleotides on the target RNA side of the guide-target RNA scaffold and 10 nucleotides on the engineered guide RNA side of the guide-target RNA scaffold. An asymmetrical internal loop of the present disclosure can be formed by 5 nucleotides on the target RNA side of the guide-target RNA scaffold and 50 nucleotides on the engineered polynucleotide side of the guide-target RNA scaffold. An asymmetrical internal loop of the present disclosure can be formed by 5 nucleotides on the target RNA side of the guide-target RNA scaffold and 100 nucleotides on the engineered polynucleotide side of the guide-target RNA scaffold. An asymmetrical internal loop of the present disclosure can be formed by 5 nucleotides on the target RNA side of the guide-target RNA scaffold and 150 nucleotides on the engineered polynucleotide side of the guide-target RNA scaffold. An asymmetrical internal loop of the present disclosure can be formed by 5 nucleotides on the target RNA side of the guide-target RNA scaffold and 200 nucleotides on the engineered polynucleotide side of the guide-target RNA scaffold. An asymmetrical internal loop of the present disclosure can be formed by 5 nucleotides on the target RNA side of the guide-target RNA scaffold and 300 nucleotides on the engineered polynucleotide side of the guide-target RNA scaffold. An asymmetrical internal loop of the present disclosure can be formed by 5 nucleotides on the target RNA side of the guide-target RNA scaffold and 400 nucleotides on the engineered polynucleotide side of the guide-target RNA scaffold. An asymmetrical internal loop of the present disclosure can be formed by 5 nucleotides on the target RNA side of the guide-target RNA scaffold and 500 nucleotides on the engineered polynucleotide side of the guide-target RNA scaffold. An asymmetrical internal loop of the present disclosure can be formed by 5 nucleotides on the target RNA side of the guide-target RNA scaffold and 1000 nucleotides on the engineered polynucleotide side of the guide-target RNA scaffold. An asymmetrical internal loop of the present disclosure can be formed by 1000 nucleotides on the target RNA side of the guide-target RNA scaffold and 5 nucleotides on the engineered polynucleotide side of the guide-target RNA scaffold. An asymmetrical internal loop of the present disclosure can be formed by 500 nucleotides on the target RNA side of the guide-target RNA scaffold and 5 nucleotides on the engineered polynucleotide side of the guide-target RNA scaffold. An asymmetrical internal loop of the present disclosure can be formed by 400 nucleotides on the target RNA side of the guide-target RNA scaffold and 5 nucleotides on the engineered polynucleotide side of the guide-target RNA scaffold. An asymmetrical internal loop of the present disclosure can be formed by 300 nucleotides on the target RNA side of the guide-target RNA scaffold and 5 nucleotides on the engineered polynucleotide side of the guide-target RNA scaffold. An asymmetrical internal loop of the present disclosure can be formed by 200 nucleotides on the target RNA side of the guide-target RNA scaffold and 5 nucleotides on the engineered polynucleotide side of the guide-target RNA scaffold. An asymmetrical internal loop of the present disclosure can be formed by 150 nucleotides on the target RNA side of the guide-target RNA scaffold and 5 nucleotides on the engineered polynucleotide side of the guide-target RNA scaffold. An asymmetrical internal loop of the present disclosure can be formed by 100 nucleotides on the target RNA side of the guide-target RNA scaffold and 5 nucleotides on the engineered polynucleotide side of the guide-target RNA scaffold. An asymmetrical internal loop of the present disclosure can be formed by 50 nucleotides on the target RNA side of the guide-target RNA scaffold and 5 nucleotides on the engineered polynucleotide side of the guide-target RNA scaffold. An asymmetrical internal loop of the present disclosure can be formed by 50 nucleotides on the target RNA side of the guide-target RNA scaffold and 100 nucleotides on the engineered polynucleotide side of the guide-target RNA scaffold. An asymmetrical internal loop of the present disclosure can be formed by 50 nucleotides on the target RNA side of the guide-target RNA scaffold and 150 nucleotides on the engineered polynucleotide side of the guide-target RNA scaffold. An asymmetrical internal loop of the present disclosure can be formed by 50 nucleotides on the target RNA side of the guide-target RNA scaffold and 200 nucleotides on the engineered polynucleotide side of the guide-target RNA scaffold. An asymmetrical internal loop of the present disclosure can be formed by 50 nucleotides on the target RNA side of the guide-target RNA scaffold and 300 nucleotides on the engineered polynucleotide side of the guide-target RNA scaffold. An asymmetrical internal loop of the present disclosure can be formed by 50 nucleotides on the target RNA side of the guide-target RNA scaffold and 400 nucleotides on the engineered polynucleotide side of the guide-target RNA scaffold. An asymmetrical internal loop of the present disclosure can be formed by 50 nucleotides on the target RNA side of the guide-target RNA scaffold and 500 nucleotides on the engineered polynucleotide side of the guide-target RNA scaffold. An asymmetrical internal loop of the present disclosure can be formed by 50 nucleotides on the target RNA side of the guide-target RNA scaffold and 1000 nucleotides on the engineered polynucleotide side of the guide-target RNA scaffold. An asymmetrical internal loop of the present disclosure can be formed by 1000 nucleotides on the target RNA side of the guide-target RNA scaffold and 50 nucleotides on the engineered polynucleotide side of the guide-target RNA scaffold. An asymmetrical internal loop of the present disclosure can be formed by 500 nucleotides on the target RNA side of the guide-target RNA scaffold and 50 nucleotides on the engineered polynucleotide side of the guide-target RNA scaffold. An asymmetrical internal loop of the present disclosure can be formed by 400 nucleotides on the target RNA side of the guide-target RNA scaffold and 50 nucleotides on the engineered polynucleotide side of the guide-target RNA scaffold. An asymmetrical internal loop of the present disclosure can be formed by 300 nucleotides on the target RNA side of the guide-target RNA scaffold and 50 nucleotides on the engineered polynucleotide side of the guide-target RNA scaffold. An asymmetrical internal loop of the present disclosure can be formed by 200 nucleotides on the target RNA side of the guide-target RNA scaffold and 50 nucleotides on the engineered polynucleotide side of the guide-target RNA scaffold. An asymmetrical internal loop of the present disclosure can be formed by 150 nucleotides on the target RNA side of the guide-target RNA scaffold and 50 nucleotides on the engineered polynucleotide side of the guide-target RNA scaffold. An asymmetrical internal loop of the present disclosure can be formed by 100 nucleotides on the target RNA side of the guide-target RNA scaffold and 50 nucleotides on the engineered polynucleotide side of the guide-target RNA scaffold. An asymmetrical internal loop of the present disclosure can be formed by 100 nucleotides on the target RNA side of the guide-target RNA scaffold and 150 nucleotides on the engineered polynucleotide side of the guide-target RNA scaffold. An asymmetrical internal loop of the present disclosure can be formed by 100 nucleotides on the target RNA side of the guide-target RNA scaffold and 200 nucleotides on the engineered polynucleotide side of the guide-target RNA scaffold. An asymmetrical internal loop of the present disclosure can be formed by 100 nucleotides on the target RNA side of the guide-target RNA scaffold and 300 nucleotides on the engineered polynucleotide side of the guide-target RNA scaffold. An asymmetrical internal loop of the present disclosure can be formed by 100 nucleotides on the target RNA side of the guide-target RNA scaffold and 400 nucleotides on the engineered polynucleotide side of the guide-target RNA scaffold. An asymmetrical internal loop of the present disclosure can be formed by 100 nucleotides on the target RNA side of the guide-target RNA scaffold and 500 nucleotides on the engineered polynucleotide side of the guide-target RNA scaffold. An asymmetrical internal loop of the present disclosure can be formed by 100 nucleotides on the target RNA side of the guide-target RNA scaffold and 1000 nucleotides on the engineered polynucleotide side of the guide-target RNA scaffold. An asymmetrical internal loop of the present disclosure can be formed by 1000 nucleotides on the target RNA side of the guide-target RNA scaffold and 100 nucleotides on the engineered polynucleotide side of the guide-target RNA scaffold. An asymmetrical internal loop of the present disclosure can be formed by 500 nucleotides on the target RNA side of the guide-target RNA scaffold and 100 nucleotides on the engineered polynucleotide side of the guide-target RNA scaffold. An asymmetrical internal loop of the present disclosure can be formed by 400 nucleotides on the target RNA side of the guide-target RNA scaffold and 100 nucleotides on the engineered polynucleotide side of the guide-target RNA scaffold. An asymmetrical internal loop of the present disclosure can be formed by 300 nucleotides on the target RNA side of the guide-target RNA scaffold and 100 nucleotides on the engineered polynucleotide side of the guide-target RNA scaffold. An asymmetrical internal loop of the present disclosure can be formed by 200 nucleotides on the target RNA side of the guide-target RNA scaffold and 100 nucleotides on the engineered polynucleotide side of the guide-target RNA scaffold. An asymmetrical internal loop of the present disclosure can be formed by 150 nucleotides on the target RNA side of the guide-target RNA scaffold and 100 nucleotides on the engineered polynucleotide side of the guide-target RNA scaffold. An asymmetrical internal loop of the present disclosure can be formed by 150 nucleotides on the target RNA side of the guide-target RNA scaffold and 200 nucleotides on the engineered polynucleotide side of the guide-target RNA scaffold. An asymmetrical internal loop of the present disclosure can be formed by 150 nucleotides on the target RNA side of the guide-target RNA scaffold and 300 nucleotides on the engineered polynucleotide side of the guide-target RNA scaffold. An asymmetrical internal loop of the present disclosure can be formed by 150 nucleotides on the target RNA side of the guide-target RNA scaffold and 400 nucleotides on the engineered polynucleotide side of the guide-target RNA scaffold. An asymmetrical internal loop of the present disclosure can be formed by 150 nucleotides on the target RNA side of the guide-target RNA scaffold and 500 nucleotides on the engineered polynucleotide side of the guide-target RNA scaffold. An asymmetrical internal loop of the present disclosure can be formed by 150 nucleotides on the target RNA side of the guide-target RNA scaffold and 1000 nucleotides on the engineered polynucleotide side of the guide-target RNA scaffold. An asymmetrical internal loop of the present disclosure can be formed by 1000 nucleotides on the target RNA side of the guide-target RNA scaffold and 150 nucleotides on the engineered polynucleotide side of the guide-target RNA scaffold. An asymmetrical internal loop of the present disclosure can be formed by 500 nucleotides on the target RNA side of the guide-target RNA scaffold and 5 nucleotides on the engineered polynucleotide side of the guide-target RNA scaffold. An asymmetrical internal loop of the present disclosure can be formed by 400 nucleotides on the target RNA side of the guide-target RNA scaffold and 150 nucleotides on the engineered polynucleotide side of the guide-target RNA scaffold. An asymmetrical internal loop of the present disclosure can be formed by 300 nucleotides on the target RNA side of the guide-target RNA scaffold and 150 nucleotides on the engineered polynucleotide side of the guide-target RNA scaffold. An asymmetrical internal loop of the present disclosure can be formed by 200 nucleotides on the target RNA side of the guide-target RNA scaffold and 300 nucleotides on the engineered polynucleotide side of the guide-target RNA scaffold. An asymmetrical internal loop of the present disclosure can be formed by 200 nucleotides on the target RNA side of the guide-target RNA scaffold and 400 nucleotides on the engineered polynucleotide side of the guide-target RNA scaffold. An asymmetrical internal loop of the present disclosure can be formed by 200 nucleotides on the target RNA side of the guide-target RNA scaffold and 500 nucleotides on the engineered polynucleotide side of the guide-target RNA scaffold. An asymmetrical internal loop of the present disclosure can be formed by 200 nucleotides on the target RNA side of the guide-target RNA scaffold and 1000 nucleotides on the engineered polynucleotide side of the guide-target RNA scaffold. An asymmetrical internal loop of the present disclosure can be formed by 1000 nucleotides on the target RNA side of the guide-target RNA scaffold and 200 nucleotides on the engineered polynucleotide side of the guide-target RNA scaffold. An asymmetrical internal loop of the present disclosure can be formed by 500 nucleotides on the target RNA side of the guide-target RNA scaffold and 200 nucleotides on the engineered polynucleotide side of the guide-target RNA scaffold. An asymmetrical internal loop of the present disclosure can be formed by 400 nucleotides on the target RNA side of the guide-target RNA scaffold and 200 nucleotides on the engineered polynucleotide side of the guide-target RNA scaffold. An asymmetrical internal loop of the present disclosure can be formed by 300 nucleotides on the target RNA side of the guide-target RNA scaffold and 200 nucleotides on the engineered polynucleotide side of the guide-target RNA scaffold. An asymmetrical internal loop of the present disclosure can be formed by 300 nucleotides on the target RNA side of the guide-target RNA scaffold and 400 nucleotides on the engineered polynucleotide side of the guide-target RNA scaffold. An asymmetrical internal loop of the present disclosure can be formed by 300 nucleotides on the target RNA side of the guide-target RNA scaffold and 500 nucleotides on the engineered polynucleotide side of the guide-target RNA scaffold. An asymmetrical internal loop of the present disclosure can be formed by 300 nucleotides on the target RNA side of the guide-target RNA scaffold and 1000 nucleotides on the engineered polynucleotide side of the guide-target RNA scaffold. An asymmetrical internal loop of the present disclosure can be formed by 1000 nucleotides on the target RNA side of the guide-target RNA scaffold and 300 nucleotides on the engineered polynucleotide side of the guide-target RNA scaffold. An asymmetrical internal loop of the present disclosure can be formed by 500 nucleotides on the target RNA side of the guide-target RNA scaffold and 300 nucleotides on the engineered polynucleotide side of the guide-target RNA scaffold. An asymmetrical internal loop of the present disclosure can be formed by 400 nucleotides on the target RNA side of the guide-target RNA scaffold and 300 nucleotides on the engineered polynucleotide side of the guide-target RNA scaffold. An asymmetrical internal loop of the present disclosure can be formed by 400 nucleotides on the target RNA side of the guide-target RNA scaffold and 500 nucleotides on the engineered polynucleotide side of the guide-target RNA scaffold. An asymmetrical internal loop of the present disclosure can be formed by 400 nucleotides on the target RNA side of the guide-target RNA scaffold and 1000 nucleotides on the engineered polynucleotide side of the guide-target RNA scaffold. An asymmetrical internal loop of the present disclosure can be formed by 1000 nucleotides on the target RNA side of the guide-target RNA scaffold and 400 nucleotides on the engineered polynucleotide side of the guide-target RNA scaffold. An asymmetrical internal loop of the present disclosure can be formed by 500 nucleotides on the target RNA side of the guide-target RNA scaffold and 400 nucleotides on the engineered polynucleotide side of the guide-target RNA scaffold. An asymmetrical internal loop of the present disclosure can be formed by 500 nucleotides on the target RNA side of the guide-target RNA scaffold and 1000 nucleotides on the engineered polynucleotide side of the guide-target RNA scaffold. An asymmetrical internal loop of the present disclosure can be formed by 1000 nucleotides on the target RNA side of the guide-target RNA scaffold and 500 nucleotides on the engineered polynucleotide side of the guide-target RNA scaffold. Thus, an asymmetrical internal loop can be a structural feature formed from latent structure provided by an engineered latent guide RNA.

[0165] In some embodiments, a first internal loop or a second internal loop can independently comprise a number of bases of at least about 5 bases or greater (e.g., 6, 7, 8, 9, 10, 11, 12, 13, 14, 15, 16, 17, 18, 19, 20, 30, 40, 50, 60, 70, 80, 90, 100, 110, 120, 130, 140, 150); about 150 bases or fewer (e.g., 145, 135, 125, 115, 95, 85, 75, 65, 55, 45, 35, 25, 19, 18, 17, 16, 15, 14, 13, 12, 11, 10, 9, 8, 7, 6, 5); or at least about 5 bases to at least about 150 bases (e.g., 5-150, 6-145, 7-140, 8-135, 9-130, 10-125, 11-120, 12-115, 13-110, 14-105, 15-100, 16-95, 17-90, 18-85, 19-80, 20-75, 21-70, 22-65, 23-60, 24-55, 25-50) of the engineered guide RNA and a number of bases of at least about 5 bases or greater (e.g., 6, 7, 8, 9, 10, 11, 12, 13, 14, 15, 16, 17, 18, 19, 20, 30, 40, 50, 60, 70, 80, 90, 100, 110, 120, 130, 140, 150); about 150 bases or fewer (e.g., 145, 135, 125, 115, 95, 85, 75, 65, 55, 45, 35, 25, 19, 18, 17, 16, 15, 14, 13, 12, 11, 10, 9, 8, 7, 6, 5); or at least about 5 bases to at least about 150 bases (e.g., 5-150, 6-145, 7-140, 8-135, 9-130, 10-125, 11-120, 12-115, 13-110, 14-105, 15-100, 16-95, 17-90, 18-85, 19-80, 20-75, 21-70, 22-65, 23-60, 24-55, 25-50) of the target RNA.

[0166] In some embodiments, an engineered guide RNA comprising a barbell macro-footprint (e.g., a latent structure that manifests as a first internal loop and a second internal loop) comprises a cytosine in a micro-footprint sequence in between the macro-footprint sequence that, when the engineered guide RNA is hybridized to the target RNA, is present in the guide-target RNA scaffold opposite an adenosine that is edited by the RNA editing entity (e.g., an on-target adenosine). In such embodiments, the cytosine of the micro-footprint is comprised in an A/C mismatch with the on-target adenosine of the target RNA in the guide-target RNA scaffold.

[0167] A first internal loop and a second internal loop of the barbell macro-footprint can be positioned a certain distance from the A/C mismatch, with respect to the base of the first internal loop and the base of the second internal loop that is the most proximal to the A/C mismatch. In some embodiments, the first internal loop and the second internal loop can be positioned the same number of bases from the A/C mismatch, with respect to the base of the first internal loop and the base of the second internal loop that is the most proximal to the A/C mismatch. In some embodiments, the first internal loop and the second internal loop can be positioned a different number of bases from the A/C mismatch, with respect to the base of the first internal loop and the base of the second internal loop that is the most proximal to the A/C mismatch.

[0168] In some embodiments, the first internal loop of the barbell or the second internal loop of the barbell can be positioned at least about 5 bases (e.g., 6, 7, 8, 9, 10, 11, 12, 13, 14, 15, 16, 17, 18, 19, 20, 21, 22, 23, 24, 25, 26, 27, 28, 29, 30, 31, 32, 33, 34, 35, 36, 37, 38, 39, 40, 41, 42, 43, 44, 45, 46, 47, 48, 49, or 50 bases) away from the A/C mismatch with respect to the base of the first internal loop or the second internal loop that is the most proximal to the A/C mismatch. In some embodiments, the first internal loop of the barbell or the second internal loop of the barbell can be positioned at most about 50 bases away from the A/C mismatch (e.g., 49, 48, 47, 46, 45, 44, 43, 42, 41, 40, 39, 38, 37, 36, 35, 34, 33, 32, 31, 30, 29, 28, 27, 26, 25, 24, 23, 22, 21, 20, 19, 18, 17, 16, 15, 14, 13, 12, 11, 10, 9, 8, 7, 6, 5) with respect to the base of the first internal loop or the second internal loop that is the most proximal to the A/C mismatch.

[0169] In some embodiments, the first internal loop can be positioned from about 1 base away from the A/C mismatch to about 30 bases away from the A/C mismatch (e.g., 1-20, 7-30, 5-20, 6-20, 5-15) with respect to the base of the first internal loop that is most proximal to the A/C mismatch. In some embodiments, the first internal loop can be positioned from about 5 bases away from the A/C mismatch to about 15 bases away from the A/C mismatch (e.g., 5-15, 6-14, 7-13, 8-12, 9-11) with respect to the base of the first internal loop that is most proximal to the A/C mismatch. In some examples, the first internal loop can be positioned from about 9 bases away from the A/C mismatch to about 15 bases away from the A/C mismatch (e.g., 10-14, 11-13) with respect to the base of the first internal loop that is the most proximal to the A/C mismatch.

[0170] In some embodiments, the second internal loop can be positioned from about 12 bases away from the A/C mismatch to about 40 bases away from the A/C mismatch (e.g., 13-39, 14-38, 15-40, 15-38, 15-37, 16-36, 17-35, 18-38, 18-34, 19-33, 20-32, 21-31, 22-30, 23-29, 24-28, 25-27) with respect to the base of the second internal loop that is the most proximal to the A/C mismatch. In some embodiments, the second internal loop can be positioned from about 20 bases away from the A/C mismatch to about 33 bases away from the A/C mismatch with respect to the base of the second internal loop that is most proximal to the A/C mismatch. In some embodiments, the second internal loop can be positioned 24, 26, 28, or 30 bases away from the A/C mismatch with respect to the base of the second internal loop that is most proximal to the A/C mismatch. In some embodiments, the first internal loop can be positioned at least about 1 base away from the on-target adenosine of the target RNA. In some embodiments, the first internal loop can be positioned about 1 base away from the on-target adenosine of the target RNA to about 30 bases away from the on-target adenosine of the target RNA. In some embodiments, the first internal loop can be positioned about 1 base away from the on-target adenosine of the target RNA to about 20 bases away from the on-target adenosine of the target RNA. In some embodiments, the first internal loop can be positioned at least about 5 bases away from the on-target adenosine of the target RNA. In some embodiments, the first internal loop can be positioned about 5 bases away from the on-target adenosine of the target RNA to about 15 bases away from the on-target adenosine of the target RNA. In some embodiments, the first internal loop can be positioned at least about 6 bases away from the on-target adenosine of the target RNA. In some embodiments, the first internal loop can be positioned about 6 bases away from the on-target adenosine of the target RNA to about 20 bases away from the on-target adenosine of the target RNA. In some embodiments, the first internal loop can be positioned at least about 7 bases away from the on-target adenosine of the target RNA. In some embodiments, the first internal loop can be positioned about 7 bases away from the on-target adenosine of the target RNA to about 30 bases away from the on-target adenosine of the target RNA. In some embodiments, the first internal loop can be positioned about 9 bases away from the on-target adenosine of the target RNA to about 15 bases away from the on-target adenosine of the target RNA. In some embodiments, the first internal loop can be positioned about 6 bases away from the on-target adenosine of the target RNA. In some embodiments, the first internal loop can be positioned about 10 bases away from the on-target adenosine of the target RNA. In some embodiments, the first internal loop can be positioned about 12 bases away from the on-target adenosine of the target RNA. In some embodiments, the first internal loop can be positioned about 15 bases away from the on-target adenosine of the target RNA. In some embodiments, the second internal loop can be positioned at least about 12 bases away from the on-target adenosine of the target RNA. In some embodiments, the second internal loop can be positioned about 12 bases away from the on-target adenosine of the target RNA to about 40 bases away from the on-target adenosine of the target RNA. In some embodiments, the second internal loop can be positioned at least about 15 bases away from the on-target adenosine of the target RNA. In some embodiments, the second internal loop can be positioned about 15 bases away from the on-target adenosine of the target RNA to about 40 bases away from the on-target adenosine of the target RNA. In some embodiments, the second internal loop can be positioned about 15 bases away from the on-target adenosine of the target RNA to about 38 bases away from the on-target adenosine of the target RNA. In some embodiments, the second internal loop can be positioned at least about 18 bases away from the on-target adenosine of the target RNA. In some embodiments, the second internal loop can be positioned about 18 bases away from the on-target adenosine of the target RNA to about 38 bases away from the on-target adenosine of the target RNA. In some embodiments, the second internal loop can be positioned about 18 bases away from the on-target adenosine of the target RNA to about 35 bases away from the on-target adenosine of the target RNA. In some embodiments, the second internal loop can be positioned about 20 bases away from the on-target adenosine of the target RNA to about 33 bases away from the on-target adenosine of the target RNA. In some embodiments, the second internal loop can be positioned about 24 bases away from the on-target adenosine of the target RNA. In some embodiments, the second internal loop can be positioned about 33 bases away from the on-target adenosine of the target RNA. In some embodiments, the second internal loop can be positioned about 34 bases away from the on-target adenosine of the target RNA. In some embodiments, the first internal loop can be positioned about 7 bases away from the on-target adenosine of the target RNA to about 30 bases away from the on-target adenosine of the target RNA and the second internal loop can be positioned about 18 bases away from the on-target adenosine of the target RNA to about 34 bases away from the on-target adenosine of the target RNA. In some embodiments, the first internal loop can be positioned about 5 bases away from the on-target adenosine of the target RNA to about 15 bases away from the on-target adenosine of the target RNA and the second internal loop can be positioned about 12 bases away from the on-target adenosine of the target RNA to about 40 bases away from the on-target adenosine of the target RNA. In some embodiments, the first internal loop can be positioned about 6 bases away from the on-target adenosine of the target RNA to about 20 bases away from the on-target adenosine of the target RNA and the second internal loop can be positioned about 15 bases away from the on-target adenosine of the target RNA to about 38 bases away from the on-target adenosine of the target RNA. In some embodiments, the first internal loop can be positioned about 5 bases away from the on-target adenosine of the target RNA to about 20 bases away from the on-target adenosine of the target RNA and the second internal loop can be positioned about 18 bases away from the on-target adenosine of the target RNA to about 38 bases away from the on-target adenosine of the target RNA. In some embodiments, the first internal loop can be positioned about 5 bases away from the on-target adenosine of the target RNA to about 15 bases away from the on-target adenosine of the target RNA and the second internal loop can be positioned about 18 bases away from the on-target adenosine of the target RNA to about 38 bases away from the on-target adenosine of the target RNA. In some embodiments, the first internal loop can be positioned about 1 base away from the on-target adenosine of the target RNA to about 20 bases away from the on-target adenosine of the target RNA and the second internal loop can be positioned about 12 bases away from the on-target adenosine of the target RNA to about 40 bases away from the on-target adenosine of the target RNA. In some embodiments, the first internal loop can be positioned about 5 bases away from the on-target adenosine of the target RNA to about 20 bases away from the on-target adenosine of the target RNA and the second internal loop can be positioned about 12 bases away from the on-target adenosine of the target RNA to about 40 bases away from the on-target adenosine of the target RNA. In some embodiments, the first internal loop can be positioned about 5 bases away from the on-target adenosine of the target RNA to about 20 bases away from the on-target adenosine of the target RNA and the second internal loop can be positioned about 15 bases away from the on-target adenosine of the target RNA to about 40 bases away from the on-target adenosine of the target RNA. In some embodiments, the first internal loop can be positioned about 10 bases away from the on-target adenosine of the target RNA and the second internal loop can be positioned about 34 bases away from the on-target adenosine of the target RNA. In some embodiments, the first internal loop can be positioned about 15 bases away from the on-target adenosine of the target RNA and the second internal loop can be positioned about 33 bases away from the on-target adenosine of the target RNA. In some embodiments, the first internal loop can be positioned about 6 bases away from the on-target adenosine of the target RNA and the second internal loop can be positioned about 34 bases away from the on-target adenosine of the target RNA. In some embodiments, the first internal loop can be positioned about 12 bases away from the on-target adenosine of the target RNA and the second internal loop can be positioned about 34 bases away from the on-target adenosine of the target RNA. In some embodiments, the first internal loop can be positioned about 6 bases away from the on-target adenosine of the target RNA and the second internal loop can be positioned about 33 bases away from the on-target adenosine of the target RNA. In some embodiments, the first internal loop can be positioned about 12 bases away from the on-target adenosine of the target RNA and the second internal loop can be positioned about 24 bases away from the on-target adenosine of the target RNA. In some embodiments, the first internal loop can be positioned about 10 bases away from the on-target adenosine of the target RNA and the second internal loop can be positioned about 33 bases away from the on-target adenosine of the target RNA. In some embodiments, the engineered guide RNA can comprise a cytosine that, when the engineered guide RNA is hybridized to the target RNA, is present in the guide-target RNA scaffold opposite the on-target adenosine that is edited by the RNA editing entity, thereby forming an A/C mismatch in the double stranded RNA substrate. In some embodiments, the first internal loop and the second internal loop can be positioned the same number of bases from the A/C mismatch with respect to the base of the first internal loop and the base of the second internal loop that is most proximal to the A/C mismatch. In some embodiments, the first internal loop can be positioned at least about 1 base away from the A/C mismatch with respect to the base of the first internal loop that is most proximal to the A/C mismatch. In some embodiments, the first internal loop can be positioned about 1 base away from the A/C mismatch to about 20 bases away from the A/C mismatch with respect to the base of the first internal loop that is most proximal to the A/C mismatch. In some embodiments, the first internal loop can be positioned at least about 5 bases away from the A/C mismatch with respect to the base of the first internal loop that is most proximal to the A/C mismatch. In some embodiments, the first internal loop can be positioned about 5 bases away from the A/C mismatch to about 20 bases away from the A/C mismatch with respect to the base of the first internal loop that is most proximal to the A/C mismatch. In some embodiments, the first internal loop can be positioned about 5 bases away from the A/C mismatch to about 15 bases away from the A/C mismatch with respect to the base of the first internal loop that is most proximal to the A/C mismatch. In some embodiments, the first internal loop can be positioned at least about 6 bases away from the A/C mismatch with respect to the base of the first internal loop that is most proximal to the A/C mismatch. In some embodiments, the first internal loop can be positioned about 6 bases away from the A/C mismatch to about 20 bases away from the A/C mismatch with respect to the base of the first internal loop that is most proximal to the A/C mismatch. In some embodiments, the first internal loop can be positioned at least about 7 bases away from the A/C mismatch with respect to the base of the first internal loop that is most proximal to the A/C mismatch. In some embodiments, the first internal loop can be positioned about 7 bases away from the A/C mismatch to about 30 bases away from the A/C mismatch with respect to the base of the first internal loop that is most proximal to the A/C mismatch. In some embodiments, the first internal loop can be positioned about 9 bases away from the A/C mismatch to about 15 bases away from the A/C mismatch with respect to the base of the first internal loop that is most proximal to the A/C mismatch. In some embodiments, the second internal loop can be positioned at least about 12 bases away from the A/C mismatch with respect to the base of the second internal loop that is most proximal to the A/C mismatch. In some embodiments, the second internal loop can be positioned about 12 bases away from the A/C mismatch to about 40 bases away from the A/C mismatch with respect to the base of the second internal loop that is most proximal to the A/C mismatch. In some embodiments, the second internal loop can be positioned at least about 15 bases away from the A/C mismatch with respect to the base of the second internal loop that is most proximal to the A/C mismatch. In some embodiments, the second internal loop can be positioned about 15 bases away from the A/C mismatch to about 40 bases away from the A/C mismatch with respect to the base of the second internal loop that is most proximal to the A/C mismatch. In some embodiments, the second internal loop can be positioned about 15 bases away from the A/C mismatch to about 38 bases away from the A/C mismatch with respect to the base of the second internal loop that is most proximal to the A/C mismatch. In some embodiments, the second internal loop can be positioned at least about 18 bases away from the A/C mismatch with respect to the base of the second internal loop that is most proximal to the A/C mismatch. In some embodiments, the second internal loop can be positioned about 18 bases away from the A/C mismatch to about 38 bases away from the A/C mismatch with respect to the base of the second internal loop that is most proximal to the A/C mismatch. In some embodiments, the second internal loop can be positioned about 18 bases away from the A/C mismatch to about 35 bases away from the A/C mismatch with respect to the base of the second internal loop that is most proximal to the A/C mismatch. In some embodiments, the second internal loop can be positioned about 20 bases away from the A/C mismatch to about 33 bases away from the A/C mismatch with respect to the base of the second internal loop that is most proximal to the A/C mismatch. In some embodiments, the second internal loop can be positioned about 24 bases away from the A/C mismatch with respect to the base of the second internal loop that is most proximal to the A/C mismatch. In some embodiments, the second internal loop can be positioned about 33 bases away from the A/C mismatch with respect to the base of the second internal loop that is most proximal to the A/C mismatch. In some embodiments, the second internal loop can be positioned about 34 bases away from the A/C mismatch with respect to the base of the second internal loop that is most proximal to the A/C mismatch. In some embodiments, the first internal loop can be positioned about 10 bases away from the A/C mismatch with respect to the base of the first internal loop that is most proximal to the A/C mismatch and the second internal loop can be positioned about 34 bases away from the A/C mismatch with respect to the base of the second internal loop that is most proximal to the A/C mismatch. In some embodiments, the first internal loop can be positioned about 15 bases away from the A/C mismatch with respect to the base of the first internal loop that is most proximal to the A/C mismatch and the second internal loop can be positioned about 33 bases away from the A/C mismatch with respect to the base of the second internal loop that is most proximal to the A/C mismatch. In some embodiments, the first internal loop can be positioned about 6 bases away from the A/C mismatch with respect to the base of the first internal loop that is most proximal to the A/C mismatch and the second internal loop can be positioned about 34 bases away from the A/C mismatch with respect to the base of the second internal loop that is most proximal to the A/C mismatch. In some embodiments, the first internal loop can be positioned about 12 bases away from the A/C mismatch with respect to the base of the first internal loop that is most proximal to the A/C mismatch and the second internal loop can be positioned about 34 bases away from the A/C mismatch with respect to the base of the second internal loop that is most proximal to the A/C mismatch. In some embodiments, the first internal loop can be positioned about 6 bases away from the A/C mismatch with respect to the base of the first internal loop that is most proximal to the A/C mismatch and the second internal loop can be positioned about 33 bases away from the A/C mismatch with respect to the base of the second internal loop that is most proximal to the A/C mismatch. In some embodiments, the first internal loop can be positioned about 12 bases away from the A/C mismatch with respect to the base of the first internal loop that is most proximal to the A/C mismatch and the second internal loop can be positioned about 24 bases away from the A/C mismatch with respect to the base of the second internal loop that is most proximal to the A/C mismatch. In some embodiments, the first internal loop can be positioned about 10 bases away from the A/C mismatch with respect to the base of the first internal loop that is most proximal to the A/C mismatch and the second internal loop can be positioned about 33 bases away from the A/C mismatch with respect to the base of the second internal loop that is most proximal to the A/C mismatch.

[0171] In some embodiments, a target RNA can be an ABCA4 RNA. In this example, an engineered guide RNA comprising a barbell macro-footprint sequence, upon hybridization with the ABCA4 mRNA, forms a guide-target RNA scaffold with the ABCA4 RNA. The ABCA4 guide-target RNA scaffold when present comprises a right internal loop (e.g., a right barbell) and a left internal loop (e.g., a left barbell) manifested from the barbell macro-footprint sequence.

[0172] In some embodiments, a guide RNA targeting ABCA4 can comprise a first internal loop and a second internal loop independently positioned as follows: the first internal loop is positioned at a distance of about 2 bases or greater upstream of the on-target adenosine (e.g., 3, 4, 5, 6, 7, 8, 9, 10, 11, 12, 13, 14, 15, 16, 17, 18, 19, 20), about 20 bases or fewer upstream of the on-target adenosine (e.g., 19, 18, 17, 16, 15, 14, 13, 12, 11, 10, 9, 8, 7, 6, 5, 4, 3, 2), or from about 2 bases to about 20 bases upstream of the on-target adenosine (e.g., 3-19, 4-18, 5-17, 6-16, 7-15, 8-14, 9-13, 10-12); and the second internal loop is positioned at a distance of about 12 bases or greater downstream of the on-target adenosine (e.g., 12, 13, 14, 15, 16, 17, 18, 19, 20, 21, 22, 23, 24, 25, 26, 27, 28, 29, 30, 31, 32, 33, 34, 35, 36, 37, 38, 39, 40), about 40 bases or fewer downstream of the on-target adenosine (e.g., 39, 38, 37, 36, 35, 34, 33, 32, 31, 30, 29, 28, 27, 26, 25, 24, 23, 22, 21, 20, 19, 18, 17, 16, 15, 14, 13, 12, 11, 10, 9, 8, 7, 6, 5, 4, 3, 2), or from about 12 bases to about 40 bases downstream of the on-target adenosine (e.g., 13-39, 14-38, 15-37, 16-36, 17-35, 18-34, 19-33, 20-32, 21-31, 22-30, 23-29, 24-28, 25-27).

[0173] In some embodiments, a guide RNA targeting ABCA4 can comprise: a first internal loop positioned about 5 bases upstream of the on-target adenosine and a second internal loop positioned about 27 bases downstream of the on-target adenosine; a first internal loop positioned about 5 bases upstream of the on-target adenosine and a second internal loop positioned about 32 bases downstream of the on-target adenosine; a first internal loop positioned about 5 bases upstream of the on-target adenosine and a second internal loop positioned about 33 bases downstream of the on-target adenosine; a first internal loop positioned about 9 bases upstream of the on-target adenosine and a second internal loop positioned about 33 bases downstream of the on-target adenosine; a first internal loop positioned about 10 bases upstream of the on-target adenosine and a second internal loop positioned about 33 bases downstream of the on-target adenosine; a first internal loop positioned about 13 bases upstream of the on-target adenosine and a second internal loop positioned about 33 bases downstream of the on-target adenosine; a first internal loop positioned about 14 bases upstream of the on-target adenosine and a second internal loop positioned about 33 bases downstream of the on-target adenosine; or a first internal loop positioned about 15 bases upstream of the on-target adenosine and a second internal loop positioned about 33 bases downstream of the on-target adenosine.

[0174] In some embodiments, an engineered guide RNA targeting ABCA4 can comprise a first internal loop positioned at a distance of about 15 bases upstream of the target adenosine to be edited and a second internal loop positioned at a distance of about 33 bases downstream of the target adenosine to be edited. Said engineered guide RNAs can exhibit superior on-target editing and low off-target editing, resulting in less than about 3% off-target editing. Thus, an engineered guide RNA targeting ABCA4 and forming a barbell macro-footprint, where the first internal loop is at the −15 position and the second internal loop is at the +33 position can be highly efficient and specific, with about 40% or more on-target editing and less than about 3% off target editing by ADAR.

[0175] In some embodiments, a target RNA can be an GAPDH RNA. In this example, an engineered guide RNA comprising a barbell macro-footprint sequence, upon hybridization with the GAPDH mRNA, forms a guide-target RNA scaffold with the GAPDH RNA. The GAPDH guide-target RNA scaffold when present comprises a right internal loop (e.g., a right barbell) and a left internal loop (e.g., a left barbell) manifested from the barbell macro-footprint sequence.

[0176] In some embodiments, a guide RNA targeting GAPDH can comprise a first internal loop and a second internal loop independently positioned as follows: the first internal loop is positioned at a distance of about 2 bases or greater upstream of the on-target adenosine (e.g., 3, 4, 5, 6, 7, 8, 9, 10, 11, 12, 13, 14, 15, 16, 17, 18, 19, 20), about 20 bases or fewer upstream of the on-target adenosine (e.g., 19, 18, 17, 16, 15, 14, 13, 12, 11, 10, 9, 8, 7, 6, 5, 4, 3, 2), or from about 2 bases to about 20 bases upstream of the on-target adenosine (e.g., 3-19, 4-18, 5-17, 6-16, 7-15, 8-14, 9-13, 10-12); and the second internal loop is positioned at a distance of about 12 bases or greater downstream of the on-target adenosine (e.g., 12, 13, 14, 15, 16, 17, 18, 19, 20, 21, 22, 23, 24, 25, 26, 27, 28, 29, 30, 31, 32, 33, 34, 35, 36, 37, 38, 39, 40), about 40 bases or fewer downstream of the on-target adenosine (e.g., 39, 38, 37, 36, 35, 34, 33, 32, 31, 30, 29, 28, 27, 26, 25, 24, 23, 22, 21, 20, 19, 18, 17, 16, 15, 14, 13, 12, 11, 10, 9, 8, 7, 6, 5, 4, 3, 2), or from about 12 bases to about 40 bases downstream of the on-target adenosine (e.g., 13-39, 14-38, 15-37, 16-36, 17-35, 18-34, 19-33, 20-32, 21-31, 22-30, 23-29, 24-28, 25-27).

[0177] In some embodiments, a guide RNA targeting GAPDH can comprise: a first internal loop positioned about 5 bases upstream of the on-target adenosine and a second internal loop positioned about 27 bases downstream of the on-target adenosine; a first internal loop positioned about 5 bases upstream of the on-target adenosine and a second internal loop positioned about 32 bases downstream of the on-target adenosine; a first internal loop positioned about 5 bases upstream of the on-target adenosine and a second internal loop positioned about 33 bases downstream of the on-target adenosine; a first internal loop positioned about 9 bases upstream of the on-target adenosine and a second internal loop positioned about 33 bases downstream of the on-target adenosine; a first internal loop positioned about 10 bases upstream of the on-target adenosine and a second internal loop positioned about 33 bases downstream of the on-target adenosine; a first internal loop positioned about 13 bases upstream of the on-target adenosine and a second internal loop positioned about 33 bases downstream of the on-target adenosine; a first internal loop positioned about 14 bases upstream of the on-target adenosine and a second internal loop positioned about 33 bases downstream of the on-target adenosine; or a first internal loop positioned about 15 bases upstream of the on-target adenosine and a second internal loop positioned about 33 bases downstream of the on-target adenosine.

[0178] In some embodiments, a target RNA can be an MAPT RNA. In this example, an engineered guide RNA comprising a barbell macro-footprint sequence, upon hybridization with the MAPT mRNA, forms a guide-target RNA scaffold with the MAPT RNA. The MAPT guide-target RNA scaffold when present comprises a right internal loop (e.g., a right barbell) and a left internal loop (e.g., a left barbell) manifested from the barbell macro-footprint sequence.

[0179] In some embodiments, a guide RNA targeting MAPT can comprise a first internal loop and a second internal loop independently positioned as follows: the first internal loop is positioned at a distance of about 2 bases or greater upstream of the on-target adenosine (e.g., 3, 4, 5, 6, 7, 8, 9, 10, 11, 12, 13, 14, 15, 16, 17, 18, 19, 20), about 20 bases or fewer upstream of the on-target adenosine (e.g., 19, 18, 17, 16, 15, 14, 13, 12, 11, 10, 9, 8, 7, 6, 5, 4, 3, 2), or from about 2 bases to about 20 bases upstream of the on-target adenosine (e.g., 3-19, 4-18, 5-17, 6-16, 7-15, 8-14, 9-13, 10-12); and the second internal loop is positioned at a distance of about 12 bases or greater downstream of the on-target adenosine (e.g., 12, 13, 14, 15, 16, 17, 18, 19, 20, 21, 22, 23, 24, 25, 26, 27, 28, 29, 30, 31, 32, 33, 34, 35, 36, 37, 38, 39, 40), about 40 bases or fewer downstream of the on-target adenosine (e.g., 39, 38, 37, 36, 35, 34, 33, 32, 31, 30, 29, 28, 27, 26, 25, 24, 23, 22, 21, 20, 19, 18, 17, 16, 15, 14, 13, 12, 11, 10, 9, 8, 7, 6, 5, 4, 3, 2), or from about 12 bases to about 40 bases downstream of the on-target adenosine (e.g., 13-39, 14-38, 15-37, 16-36, 17-35, 18-34, 19-33, 20-32, 21-31, 22-30, 23-29, 24-28, 25-27), or 24 bases, 26 bases, 28 bases, or 30 bases downstream of the on-target adenosine of the target RNA.

[0180] In some embodiments, a guide RNA targeting MAPT can comprise: a first internal loop positioned about 5 bases upstream of the on-target adenosine and a second internal loop positioned about 27 bases downstream of the on-target adenosine; a first internal loop positioned about 5 bases upstream of the on-target adenosine and a second internal loop positioned about 32 bases downstream of the on-target adenosine; a first internal loop positioned about 5 bases upstream of the on-target adenosine and a second internal loop positioned about 33 bases downstream of the on-target adenosine; a first internal loop positioned about 9 bases upstream of the on-target adenosine and a second internal loop positioned about 33 bases downstream of the on-target adenosine; a first internal loop positioned about 10 bases upstream of the on-target adenosine and a second internal loop positioned about 33 bases downstream of the on-target adenosine; a first internal loop positioned about 13 bases upstream of the on-target adenosine and a second internal loop positioned about 33 bases downstream of the on-target adenosine; a first internal loop positioned about 14 bases upstream of the on-target adenosine and a second internal loop positioned about 33 bases downstream of the on-target adenosine; or a first internal loop positioned about 15 bases upstream of the on-target adenosine and a second internal loop positioned about 33 bases downstream of the on-target adenosine.

[0181] In some embodiments, a target RNA can be an LRRK2 RNA. In this example, an engineered guide RNA comprising a barbell macro-footprint sequence, upon hybridization with the LRRK2 mRNA, forms a guide-target RNA scaffold with the LRRK2 RNA. The LRRK2 guide-target RNA scaffold when present comprises a right internal loop (e.g., a right barbell) and a left internal loop (e.g., a left barbell) manifested from the barbell macro-footprint sequence.

[0182] In some embodiments, a guide RNA targeting LRRK2 can comprise a first internal loop and a second internal loop independently positioned as follows: the first internal loop is positioned at a distance of about 2 bases or greater upstream of the on-target adenosine (e.g., 3, 4, 5, 6, 7, 8, 9, 10, 11, 12, 13, 14, 15, 16, 17, 18, 19, 20), about 20 bases or fewer upstream of the on-target adenosine (e.g., 19, 18, 17, 16, 15, 14, 13, 12, 11, 10, 9, 8, 7, 6, 5, 4, 3, 2), or from about 2 bases to about 20 bases upstream of the on-target adenosine (e.g., 3-19, 4-18, 5-17, 6-16, 7-15, 8-14, 9-13, 10-12); and the second internal loop is positioned at a distance of about 12 bases or greater downstream of the on-target adenosine (e.g., 12, 13, 14, 15, 16, 17, 18, 19, 20, 21, 22, 23, 24, 25, 26, 27, 28, 29, 30, 31, 32, 33, 34, 35, 36, 37, 38, 39, 40), about 40 bases or fewer downstream of the on-target adenosine (e.g., 39, 38, 37, 36, 35, 34, 33, 32, 31, 30, 29, 28, 27, 26, 25, 24, 23, 22, 21, 20, 19, 18, 17, 16, 15, 14, 13, 12, 11, 10, 9, 8, 7, 6, 5, 4, 3, 2), from about 12 bases to about 40 bases downstream of the on-target adenosine (e.g., 13-39, 14-38, 15-37, 16-36, 17-35, 18-34, 19-33, 20-32, 21-31, 22-30, 23-29, 24-28, 25-27), or 24 bases, 26 bases, 28 bases, or 30 bases downstream of the on-target adenosine of the target RNA.

[0183] In some embodiments, a guide RNA targeting LRRK2 can comprise: a first internal loop positioned about 5 bases upstream of the on-target adenosine and a second internal loop positioned about 27 bases downstream of the on-target adenosine; a first internal loop positioned about 5 bases upstream of the on-target adenosine and a second internal loop positioned about 32 bases downstream of the on-target adenosine; a first internal loop positioned about 5 bases upstream of the on-target adenosine and a second internal loop positioned about 33 bases downstream of the on-target adenosine; a first internal loop positioned about 9 bases upstream of the on-target adenosine and a second internal loop positioned about 33 bases downstream of the on-target adenosine; a first internal loop positioned about 10 bases upstream of the on-target adenosine and a second internal loop positioned about 33 bases downstream of the on-target adenosine; a first internal loop positioned about 13 bases upstream of the on-target adenosine and a second internal loop positioned about 33 bases downstream of the on-target adenosine; a first internal loop positioned about 14 bases upstream of the on-target adenosine and a second internal loop positioned about 33 bases downstream of the on-target adenosine; or a first internal loop positioned about 15 bases upstream of the on-target adenosine and a second internal loop positioned about 33 bases downstream of the on-target adenosine.

[0184] In some embodiments, an engineered guide RNA targeting LRRK2 can comprise a first internal loop positioned at a distance of about 10 bases upstream of the on-target adenosine and a second internal loop positioned at a distance of about 34 bases downstream of the on-target adenosine.

[0185] In some embodiments, the first barbell or second barbell can be symmetrical internal loops that comprise 8 bases. In some embodiments, either the first barbell or the second barbell may not comprise 8 bases.

[0186] In some embodiments, the first barbell or second barbell can be symmetrical internal loops that comprise 6 bases. In some embodiments, either the first barbell or the second barbell may not comprise 6 bases.

### Micro-Footprint Sequences

[0187] As disclosed herein, an engineered guide RNA comprising a barbell macro-footprint sequence comprises a micro-footprint sequence in between the barbell macro-footprint that, upon hybridization to the target RNA, produces latent structures that manifest as one or more structural features.

[0188] In some embodiments, the present disclosure provides for engineered guide RNAs comprising a barbell macro-footprint. In some embodiments, the present disclosure provides for engineered guide RNAs comprising a micro-footprint. In some embodiments, the present disclosure provides for engineered guide RNAs comprising a macro-footprint and a micro-footprint, where the macro-footprint includes barbells (or internal loops) near the 5′ and 3′ ends of the guide-target RNA scaffold and the micro-footprint includes other structural features including, but not limited to, mismatches, symmetric internal loops, asymmetric internal loops, symmetric bulges, or asymmetric bulges. For example, an engineered guide RNA disclosed herein can have a macro-footprint and a micro-footprint of A/G mismatches at local off-target adenosines. An engineered guide RNA disclosed herein may have a macro-footprint and a micro-footprint of I/O asymmetric bulges (formed by an A in the target RNA and deletion of a U in the engineered guide RNA) at local off-target adenosines. An engineered guide RNA disclosed herein can have a macro-footprint of barbells (including an internal loop near the 5′ end of the guide-target RNA scaffold and an internal loop near the 3′ end of the guide-target RNA scaffold) and a micro-footprint of A/G mismatches at local off-target adenosines. An engineered guide RNA disclosed herein may have a macro-footprint of barbells (including an internal loop near the 5′ end of the guide-target RNA scaffold and an internal loop near the 3′ end of the guide-target RNA scaffold) and a micro-footprint of I/O asymmetric bulges (formed by an A in the target RNA and deletion of a U in the engineered guide RNA) at local off-target adenosines. In some embodiments, an engineered guide RNA disclosed herein may have a macro-footprint of barbells (including an internal loop near the 5′ end of the guide-target RNA scaffold and an internal loop near the 3′ end of the guide-target RNA scaffold) and a micro-footprint of a 5/5 symmetric loop, 1/1 G/G mismatch, and a 3/3 symmetric bulge to boost on-target adenosine editing while also reducing local off-target adenosine editing. In some embodiments, the barbell macro-footprint is engineered to form an internal loop at the −14 position and an internal loop at the +22 position relative to the target adenosine (position 0). In some embodiments, the barbell macro-footprint is engineered to form an internal loop at the −20 position and an internal loop at the +26 position relative to the target adenosine (position 0).

[0189] A micro-footprint sequence of a guide RNA comprising latent structures (e.g., a “latent structure guide RNA”) can comprise a portion of sequence that, upon hybridization to a target RNA, forms at least a portion of a structural feature, other than a single A/C mismatch feature at the target adenosine to be edited. A structural feature of the latent guide RNA is thus latent, in that the structural feature forms, forms only upon, or substantially forms, upon hybridization of the guide RNA to the target RNA. In some embodiments, a latent structural feature formed upon hybridization to a target RNA includes at least two contiguous nucleotides of the guide RNA. In some instances, a latent structural feature can include a mismatch that is in addition to the A/C mismatch feature at the target adenosine to be edited, with this additional mismatch providing an increase in an amount of editing of the target RNA in the presence of the RNA editing entity, relative to an otherwise comparable guide RNA lacking the additional mismatch. In some embodiments, the engineered guide RNAs disclosed herein lack an RNA editing entity recruiting domain that is formed and present in the absence of binding to the target RNA. A guide-target RNA scaffold, as disclosed herein, can be a resulting double stranded RNA duplex formed upon hybridization of a guide RNA to a target RNA, where the guide RNA prior to hybridizing to the target RNA comprise a portion of sequence that, upon hybridization to a target RNA, forms at least a portion of a structural feature, other than a single A/C mismatch feature at the target adenosine to be edited. Accordingly, a guide-target RNA scaffold has structural features formed within the double stranded RNA duplex. For example, the guide-target RNA scaffold can have two or more features selected from the group consisting of a bulge, mismatch, internal loop, hairpin, wobble base pair, and any combination thereof. In some embodiments, engineered guide RNAs with latent structure lack an RNA editing entity recruiting domain that is formed and present in the absence of binding to the target RNA. In some embodiments, engineered guide RNAs with latent structure further comprise a recruiting domain that is formed and present in the absence of binding to the target RNA.

[0190] In some examples, an engineered guide RNA disclosed herein, when present in an aqueous solution and not bound to the target RNA molecule, does not recruit an RNA editing entity. In some examples, (i) the engineered guide RNA, when present in an aqueous solution and not bound to the target RNA molecule, does not comprise any bulges, internal loops, or hairpins; (ii) the engineered guide RNA, when present in an aqueous solution and not bound to the target RNA molecule, does not comprise any bulges, internal loops, or hairpins that recruit a human ADAR1 with a dissociation constant lower than about 100 nM, 200 nM, 300 nM, 400 nM, 500 nM, 600 nM, 700 nM, 800 nM, 900 nM, or 1,000 nM as determined by an in vitro assay; (iii) the engineered guide RNA, upon at least partially binding to the target RNA molecule and thereby forming a guide-target RNA scaffold, is configured to adopt a structural feature (along with the target RNA) that recruits an RNA editing entity; or (iv) any combination thereof. In some examples, the engineered guide RNA, when present in an aqueous solution and not bound to the target RNA molecule, if it binds to the RNA editing entity, does so with a dissociation constant of about greater than or equal to about 100 nM, 200 nM, 300 nM, 400 nM, 500 nM, 600 nM, 700 nM, 800 nM, 900 nM, or 1,000 nM. In some examples, the engineered guide RNA, when present in an aqueous solution and not bound to the target RNA molecule, if it binds to the RNA editing entity, does so with a dissociation constant of about greater than or equal to about 500 nM. In some examples, the engineered guide RNAs disclosed herein, when present in an aqueous solution and not bound to the target RNA molecule, lack a structural feature described herein. In some examples, the engineered guide RNAs disclosed herein, when present in an aqueous solution and not bound to the target RNA molecule does not comprise any bulges, internal loops, or hairpins. In some examples, the engineered guide RNAs disclosed herein, when present in an aqueous solution and not bound to the target RNA molecule, can be linear and do not comprise any structural features.

[0191] In some examples, an engineered guide RNA can be configured to facilitate an editing of a base of a nucleotide or polynucleotide of a region of a target RNA by a subject RNA editing entity. In order to facilitate editing, an engineered guide RNA of the disclosure can recruit an RNA editing entity (e.g., an adenosine deaminase).

[0192] In cases where an RNA editing entity recruiting domain formed and present in the absence of binding to a target RNA is not included in an engineered guide RNA, the engineered guide RNA can be still capable of associating with a subject RNA editing entity (e.g., ADAR) to facilitate editing of a target RNA, modulate expression of a polypeptide encoded by a subject target RNA, or both. This can be achieved through the presence of structural features that manifest from latent structures formed upon hybridization of the guide RNA and target RNA. Structural features can comprise any one of a: mismatch, symmetrical bulge, asymmetrical bulge, symmetrical internal loop, asymmetrical internal loop, hairpins, wobble base pairs, a structured motif, circularized RNA, chemical modification, or any combination thereof. In an aspect, a double stranded RNA (dsRNA) substrate (e.g., a guide-target RNA scaffold), is formed upon hybridization of an engineered guide RNA of the present disclosure to a target RNA. The resulting dsRNA is also referred to herein as a “guide-target RNA scaffold.” Described herein is a feature, which corresponds to one of several structural features that can be present in a guide-target RNA scaffold of the present disclosure. Examples of features include a mismatch, a bulge (symmetrical bulge or asymmetrical bulge), an internal loop (symmetrical internal loop or asymmetrical internal loop), or a hairpin (a hairpin comprising a non-targeting domain). Engineered guide RNAs of the present disclosure can have from 1 to 50 features. For example, engineered guide RNAs of the present disclosure can have from 1 to 5, from 5 to 10, from 10 to 15, from 15 to 20, from 20 to 25, from 25 to 30, from 30 to 35, from 35 to 40, from 40 to 45, from 45 to 50, from 5 to 20, from 5 to 25, from 5 to 30, from 5 to 35, from 5 to 40, from 5 to 45, from 5 to 50, from 1 to 2, from 1 to 3, from 1 to 4, from 1 to 5, from 1 to 6, from 1 to 7, from 1 to 8, from 1 to 9, from 1 to 10, from 1 to 11, from 1 to 12, from 1 to 13, from 1 to 14, from 1 to 15, from 1 to 16, from 1 to 17, from 1 to 18, from 1 to 19, from 1 to 20, from 1 to 21, from 1 to 22, from 1 to 23, from 1 to 24, from 1 to 25, from 1 to 26, from 1 to 27, from 1 to 28, from 1 to 29, from 1 to 30, from 1 to 31, from 1 to 32, from 1 to 33, from 1 to 34, from 1 to 35, from 1 to 36, from 1 to 37, from 1 to 38, from 1 to 39, from 1 to 40, from 1 to 41, from 1 to 42, from 1 to 43, from 1 to 44, from 1 to 45, from 1 to 46, from 1 to 47, from 1 to 48, from 1 to 49, from 4 to 5, from 2 to 10, from 20 to 40, from 10 to 40, from 20 to 50, from 30 to 50, from 4 to 7, or from 8 to 10 features. In some instances, an engineered guide RNA can have at least about 1, 2, 3, 4, 5, 6, 7, 8, 9, 10, 11, 12, 13, 14, 15, 16, 17, 18, 19, 20, 21, 22, 23, 24, 25, 26, 27, 28, 29, 30, 31, 32, 33, 34, 35, 36, 37, 38, 39, 40, 41, 42, 43, 44, 45, 46, 47, 48, 49, 50, 51, 52, 53, 54, 55, 56, 57, 58, 59, 60, 61, 62, 63, 64, 65, 66, 67, 68, 69, 70, 71, 72, 73, 74, 75, 76, 77, 78, 79, 80, 81, 82, 83, 84, 85, 86, 87, 88, 89, 90, 91, 92, 93, 94, 95, 96, 97, 98, 99, or 100 features.

[0193] As disclosed herein, a “structured motif” comprises two or more features in a dsRNA substrate (e.g., a guide-target RNA scaffold).

[0194] As described herein, a double stranded RNA (dsRNA) substrate (e.g., a guide-target RNA scaffold) is formed upon hybridization of an engineered guide RNA of the present disclosure to a target RNA. As disclosed herein, a “mismatch” refers to a single nucleotide in a guide RNA that is unpaired to an opposing single nucleotide in a target RNA within the guide-target RNA scaffold. A mismatch can comprise any two single nucleotides that do not base pair, are not complementary, or both. Where the number of participating nucleotides on the guide RNA side and the target RNA side exceeds 1, the resulting structure is no longer considered a mismatch, but rather, is considered a bulge or an internal loop, depending on the size of the structural feature. In some embodiments, a mismatch can be an A/C mismatch as described above (e.g., an A/C mismatch comprised in the micro-footprint sequence). An A/C mismatch can comprise a C in an engineered guide RNA of the present disclosure opposite an A in a target RNA. An A/C mismatch can comprise an A in an engineered guide RNA of the present disclosure opposite an C in a target RNA. In an embodiment, a G/G mismatch can comprise a G in an engineered guide RNA of the present disclosure opposite a G in a target RNA. In some embodiments, a mismatch positioned 5′ of the edit site can facilitate base-flipping of the target A to be edited. A mismatch can also help confer sequence specificity. Thus, a mismatch can be a structural feature formed from latent structure provided by an engineered latent guide RNA. In some embodiments, a mismatch comprises a G/G mismatch. In further embodiments, a mismatch comprises an A/C mismatch, wherein the A can be in the target RNA and the C can be in the targeting sequence of the engineered guide RNA. In other embodiments, the A in the A/C mismatch can be the base of the nucleotide in the target RNA edited by a subject RNA editing entity.

[0195] In some examples, a structural feature is present when an engineered guide RNA is in association with a target RNA. A structural feature of an engineered guide RNA can form a substantially linear two-dimensional structure. A structural feature of an engineered guide RNA can comprise a linear region, a stem-loop, a cruciform, a toe hold, a mismatch bulge, or any combination thereof. In some instances, a structural feature can comprise a stem, a hairpin loop, a pseudoknot, a bulge, an internal loop, a multiloop, a G-quadruplex, or any combination thereof. In some examples, an engineered guide RNA can adopt an A-form, a B-form, a Z-form, or any combination thereof. In some embodiments, a linear engineered guide RNA can comprise ribozyme domain. In some embodiments, a linear engineered guide RNA may not comprise a ribozyme domain.

[0196] In some cases, a structural feature can be a hairpin. In some cases, an engineered guide RNA can lack a hairpin domain (e.g., the engineered guide RNA does not form an intramolecular hairpin in the absence of hybridization to a target RNA). In other cases, an engineered guide RNA can contain a hairpin domain or more than one hairpin domain. A hairpin can be located anywhere in a guide RNA. As disclosed herein, a “hairpin” includes an RNA duplex wherein a portion of a single RNA strand has folded in upon itself to form the RNA duplex. The portion of the single RNA strand folds upon itself due to having nucleotide sequences that base pair to each other, where the nucleotide sequences are separated by an intervening sequence that does not base pair with itself, thus forming a base-paired portion and a non-base paired, intervening loop portion. A hairpin can have from 10 to 500 nucleotides in length of the entire duplex structure. The loop portion of a hairpin can be from 3 to 15 nucleotides long. A hairpin can be present in any of the engineered guide RNAs disclosed herein. The engineered guide RNAs disclosed herein can have from 1 to 10 hairpins. In some embodiments, the engineered guide RNAs disclosed herein have 1 hairpin. In some embodiments, the engineered guide RNAs disclosed herein have 2 hairpins. As disclosed herein, a hairpin can be a recruitment hairpin or a non-recruitment hairpin. A hairpin can be located anywhere within the engineered guide RNAs of the present disclosure. In some embodiments, one or more hairpins can be present at the 3′ end of an engineered guide RNAs of the present disclosure, at the 5′ end of an engineered guide RNAs of the present disclosure or within the targeting sequence of an engineered guide RNAs of the present disclosure, or any combination thereof.

[0197] As disclosed herein, a hairpin can refer to a recruitment hairpin, a non-recruitment hairpin, or any combination thereof. A “recruitment hairpin,” as disclosed herein, refers to a hairpin which recruits or recruits at least in part an RNA editing entity (e.g., an ADAR). In yet another aspect, a structural feature comprises a non-recruitment hairpin. A non-recruitment hairpin, as disclosed herein, does not have a primary function of recruiting an RNA editing entity. A non-recruitment hairpin, in some instances, does not recruit an RNA editing entity. A non-recruitment hairpin can exhibit functionality that improves localization of the engineered guide RNAs to the target RNA. In some embodiments, a non-recruitment hairpin exhibits functionality that improves localization of the engineered guide RNAs to the region of the target RNA for hybridization. In some embodiments, the non-recruitment hairpin improves nuclear retention. In some embodiments, the non-recruitment hairpin comprises a hairpin from U7 snRNA. Thus, a non-recruitment hairpin such as a hairpin from U7 snRNA is a pre-formed structural feature that can be coded for in constructs comprising engineered guide RNAs. Latent structure guide RNAs can have a barbell macro-footprint sequence and at least some elements of a micro-footprint sequence. Further, pre-formed structures, such as a U7 hairpin, an smOPT sequence, or both, can be added to or bolted on to the latent structure guide RNAs to form engineered guide RNAs. Engineered guide RNAs can be expressed from constructs comprising, for example, a promoter (e.g., U1, U6, U7) and optionally operably linked to a terminator sequence (e.g., U7 terminator sequence or a U7 truncated terminator sequence). The Sm binding domain can comprise an RNA-binding domain that recognizes with high specificity, RNA sequences comprising U-rich portions. In some instances, an Sm binding domain can be responsible for both protein oligomerization and specific RNA binding.

[0198] A hairpin of the present disclosure can be of any length. In an aspect, a hairpin can be from about 10-500 or more nucleotides. In some cases, a hairpin can comprise about 10, 11, 12, 13, 14, 15, 16, 17, 18, 19, 20, 21, 22, 23, 24, 25, 26, 27, 28, 29, 30, 31, 32, 33, 34, 35, 36, 37, 38, 39, 40, 41, 42, 43, 44, 45, 46, 47, 48, 49, 50, 51, 52, 53, 54, 55, 56, 57, 58, 59, 60, 61, 62, 63, 64, 65, 66, 67, 68, 69, 70, 71, 72, 73, 74, 75, 76, 77, 78, 79, 80, 81, 82, 83, 84, 85, 86, 87, 88, 89, 90, 91, 92, 93, 94, 95, 96, 97, 98, 99, 100, 101, 102, 103, 104, 105, 106, 107, 108, 109, 110, 111, 112, 113, 114, 115, 116, 117, 118, 119, 120, 121, 122, 123, 124, 125, 126, 127, 128, 129, 130, 131, 132, 133, 134, 135, 136, 137, 138, 139, 140, 141, 142, 143, 144, 145, 146, 147, 148, 149, 150, 151, 152, 153, 154, 155, 156, 157, 158, 159, 160, 161, 162, 163, 164, 165, 166, 167, 168, 169, 170, 171, 172, 173, 174, 175, 176, 177, 178, 179, 180, 181, 182, 183, 184, 185, 186, 187, 188, 189, 190, 191, 192, 193, 194, 195, 196, 197, 198, 199, 200, 201, 202, 203, 204, 205, 206, 207, 208, 209, 210, 211, 212, 213, 214, 215, 216, 217, 218, 219, 220, 221, 222, 223, 224, 225, 226, 227, 228, 229, 230, 231, 232, 233, 234, 235, 236, 237, 238, 239, 240, 241, 242, 243, 244, 245, 246, 247, 248, 249, 250, 251, 252, 253, 254, 255, 256, 257, 258, 259, 260, 261, 262, 263, 264, 265, 266, 267, 268, 269, 270, 271, 272, 273, 274, 275, 276, 277, 278, 279, 280, 281, 282, 283, 284, 285, 286, 287, 288, 289, 290, 291, 292, 293, 294, 295, 296, 297, 298, 299, 300, 301, 302, 303, 304, 305, 306, 307, 308, 309, 310, 311, 312, 313, 314, 315, 316, 317, 318, 319, 320, 321, 322, 323, 324, 325, 326, 327, 328, 329, 330, 331, 332, 333, 334, 335, 336, 337, 338, 339, 340, 341, 342, 343, 344, 345, 346, 347, 348, 349, 350, 351, 352, 353, 354, 355, 356, 357, 358, 359, 360, 361, 362, 363, 364, 365, 366, 367, 368, 369, 370, 371, 372, 373, 374, 375, 376, 377, 378, 379, 380, 381, 382, 383, 384, 385, 386, 387, 388, 389, 390, 391, 392, 393, 394, 395, 396, 397, 398, 399, 400, 401, 402, 403, 404, 405, 406, 407, 408, 409, 410, 411, 412, 413, 414, 415, 416, 417, 418, 419, 420, 421, 422, 423, 424, 425, 426, 427, 428, 429, 430, 431, 432, 433, 434, 435, 436, 437, 438, 439, 440, 441, 442, 443, 444, 445, 446, 447, 448, 449, 450, 451, 452, 453, 454, 455, 456, 457, 458, 459, 460, 461, 462, 463, 464, 465, 466, 467, 468, 469, 470, 471, 472, 473, 474, 475, 476, 477, 478, 479, 480, 481, 482, 483, 484, 485, 486, 487, 488, 489, 490, 491, 492, 493, 494, 495, 496, 497, 498, 499, 500 or more nucleotides. In other cases, a hairpin can also comprise 10 to 20, 10 to 30, 10 to 40, 10 to 50, 10 to 60, 10 to 70, 10 to 80, 10 to 90, 10 to 100, 10 to 110, 10 to 120, 10 to 130, 10 to 140, 10 to 150, 10 to 160, 10 to 170, 10 to 180, 10 to 190, 10 to 200, 10 to 210, 10 to 220, 10 to 230, 10 to 240, 10 to 250, 10 to 260, 10 to 270, 10 to 280, 10 to 290, 10 to 300, 10 to 310, 10 to 320, 10 to 330, 10 to 340, 10 to 350, 10 to 360, 10 to 370, 10 to 380, 10 to 390, 10 to 400, 10 to 410, 10 to 420, 10 to 430, 10 to 440, 10 to 450, 10 to 460, 10 to 470, 10 to 480, 10 to 490, or 10 to 500 nucleotides.

[0199] In another aspect, a structural feature comprises a wobble base. A “wobble base pair” refers to two bases that weakly pair. For example, a wobble base pair of the present disclosure can refer to a G paired with a U. Thus, a wobble base pair can be a structural feature formed from latent structure provided by an engineered latent guide RNA.

[0200] In some cases, a structural feature can be a bulge. As disclosed herein, a double stranded RNA (dsRNA) substrate (e.g., guide-target RNA scaffold) is formed upon hybridization of an engineered guide RNA of the present disclosure to a target RNA. As disclosed herein, a “bulge” refers to the structure substantially formed only upon formation of the guide-target RNA scaffold, where contiguous nucleotides in either the engineered guide RNA or the target RNA are not complementary to their positional counterparts on the opposite strand. A bulge can change the secondary or tertiary structure of the guide-target RNA scaffold. A bulge can have from 0 to 4 contiguous nucleotides on the guide RNA side of the guide-target RNA scaffold and 1 to 4 contiguous nucleotides on the target RNA side of the guide-target RNA scaffold or a bulge can have from 0 to 4 nucleotides on the target RNA side of the guide-target RNA scaffold and 1 to 4 contiguous nucleotides on the guide RNA side of the guide-target RNA scaffold. However, a bulge, as used herein, does not refer to a structure where a single participating nucleotide of the engineered guide RNA and a single participating nucleotide of the target RNA do not base pair—a single participating nucleotide of the engineered guide RNA and a single participating nucleotide of the target RNA that do not base pair is referred to herein as a mismatch. Further, where the number of participating nucleotides on either the guide RNA side or the target RNA side exceeds 4, the resulting structure is no longer considered a bulge, but rather, is considered an internal loop. In some embodiments, the guide-target RNA scaffold of the present disclosure has 2 bulges. In some embodiments, the guide-target RNA scaffold of the present disclosure has 3 bulges. In some embodiments, the guide-target RNA scaffold of the present disclosure has 4 bulges. In some cases, the bulge comprising contiguous nucleotides in either the engineered guide RNA or the target RNA that are not complementary to their positional counterparts on the opposite strand is flanked on both sides with hybridized, complementary dsRNA regions. Thus, a bulge can be a structural feature formed from latent structure provided by an engineered latent guide RNA. In some cases, the bulge comprising contiguous nucleotides in either the engineered guide RNA or the target RNA that are not complementary to their positional counterparts on the opposite strand is flanked on both sides with hybridized, complementary dsRNA regions. A bulge can be located at any location of a guide RNA other than the last nucleotides of either the 5′ end or the 3′ end. In some cases, a bulge can be located from about 30 to about 70 nucleotides from a 5′ hydroxyl or the 3′ hydroxyl.

[0201] In some embodiments, the presence of a bulge in a guide-target RNA scaffold can position or can help to position ADAR to selectively edit the target A in the target RNA and reduce off-target editing of non-target A(s) in the target RNA. In some embodiments, the presence of a bulge in a guide-target RNA scaffold can recruit or help recruit additional amounts of ADAR. Bulges in guide-target RNA scaffolds disclosed herein can recruit other proteins, such as other RNA editing entities. In some embodiments, a bulge positioned 5′ of the edit site can facilitate base-flipping of the target A to be edited. A bulge can also help confer sequence specificity for the A of the target RNA to be edited, relative to other A(s) present in the target RNA. For example, a bulge can help direct ADAR editing by constraining it in an orientation that yields selective editing of the target A.

[0202] In some embodiments, selective editing of the target A is achieved by positioning the target A between two bulges (e.g., positioned between a 5′ end bulge and a 3′ end bulge, based on the engineered guide RNA). In some embodiments, the two bulges are both symmetrical bulges. In some embodiments, the two bulges each are formed by 2 nucleotides on the engineered guide RNA side of the guide-target RNA scaffold and 2 nucleotides on the target RNA side of the guide-target RNA scaffold. In some embodiments, the two bulges each are formed by 3 nucleotides on the engineered guide RNA side of the guide-target RNA scaffold and 3 nucleotides on the target RNA side of the guide-target RNA scaffold. In some embodiments, the two bulges each are formed by 4 nucleotides on the engineered guide RNA side of the guide-target RNA scaffold and 4 nucleotides on the target RNA side of the guide-target RNA scaffold. In some embodiments, the target A is position between the two bulges, and is at least 1, 2, 3, 4, 5, 6, 7, 8, 9, 10, 11, 12, 13, 14, 15, 16, 17, 18, 19, 20, 21, 22, 23, 24, 25, 26, 27, 28, 29, 30, 31, 32, 33, 34, 35, 36, 37, 38, 39, 40, 41, 42, 43, 44, 45, 46, 47, 48, 49, 50, 51, 52, 53, 54, 55, 56, 57, 58, 59, 60, 61, 62, 63, 64, 65, 66, 67, 68, 69, 70, 71, 72, 73, 74, 75, 76, 77, 78, 79, 80, 81, 82, 83, 84, 85, 86, 87, 88, 89, 90, 91, 92, 93, 94, 95, 96, 97, 98, 99, 100, 101, 102, 103, 104, 105, 106, 107, 108, 109, 110, 111, 112, 113, 114, 115, 116, 117, 118, 119, 120, 121, 122, 123, 124, 125, 126, 127, 128, 129, 130, 131, 132, 133, 134, 135, 136, 137, 138, 139, 140, 141, 142, 143, 144, 145, 146, 147, 148, 149, 150, 151, 152, 153, 154, 155, 156, 157, 158, 159, 160, 161, 162, 163, 164, 165, 166, 167, 168, 169, 170, 171, 172, 173, 174, 175, 176, 177, 178, 179, 180, 181, 182, 183, 184, 185, 186, 187, 188, 189, 190, 191, 192, 193, 194, 195, 196, 197, 198, 199, 200, 201,202, 203, 204, 205, 206, 207, 208, 209, 210, 211, 212, 213, 214, 215, 216, 217, 218, 219, 220, 221, 222, 223, 224, 225, 226, 227, 228, 229, 230, 231, 232, 233, 234, 235, 236, 237, 238, 239, 240, 241, 242, 243, 244, 245, 246, 247, 248, 249, 250, 251, 252, 253, 254, 255, 256, 257, 258, 259, 260, 261, 262, 263, 264, 265, 266, 267, 268, 269, 270, 271, 272, 273, 274, 275, 276, 277, 278, 279, 280, 281, 282, 283, 284, 285, 286, 287, 288, 289, 290, 291, 292, 293, 294, 295, 296, 297, 298, 299, 300, 301, 302, 303, 304, 305, 306, 307, 308, 309, 310, 311, 312, 313, 314, 315, 316, 317, 318, 319, 320, 321, 322, 323, 324, 325, 326, 327, 328, 329, 330, 331, 332, 333, 334, 335, 336, 337, 338, 339, 340, 341, 342, 343, 344, 345, 346, 347, 348, 349, 350, 351, 352, 353, 354, 355, 356, 357, 358, 359, 360, 361, 362, 363, 364, 365, 366, 367, 368, 369, 370, 371, 372, 373, 374, 375, 376, 377, 378, 379, 380, 381, 382, 383, 384, 385, 386, 387, 388, 389, 390, 391, 392, 393, 394, 395, 396, 397, 398, 399, or 400 nucleotides from a bulge (e.g., from a 5′ end bulge or a 3′ end bulge). In some embodiments, additional structural features are located between the bulges (e.g., between the 5′ end bulge and the 3′ end bulge). In some embodiments, a mismatch in a bulge comprises a nucleotide base for editing in the target RNA (e.g., an A/C mismatch in the bulge, wherein part of the bulge in the engineered guide RNA comprises a C mismatched to an A in the part of the bulge in the target RNA, and the A is edited).

[0203] In an aspect, a double stranded RNA (dsRNA) substrate (e.g., guide-target RNA scaffold) can be formed upon hybridization of an engineered guide RNA of the present disclosure to a target RNA. A bulge can be a symmetrical bulge or an asymmetrical bulge. A “symmetrical bulge” is formed when the same number of nucleotides is present on each side of the bulge. A symmetrical bulge can have from 2 to 4 nucleotides on the engineered guide RNA side of the guide-target RNA scaffold or the target RNA side of the guide-target RNA scaffold. For example, a symmetrical bulge in a guide-target RNA scaffold of the present disclosure can have the same number of nucleotides on the engineered guide RNA side and the target RNA side of the guide-target RNA scaffold. A symmetrical bulge of the present disclosure can be formed by 2 nucleotides on the engineered guide RNA side of the guide-target RNA scaffold and 2 nucleotides on the target RNA side of the guide-target RNA scaffold. A symmetrical bulge of the present disclosure can be formed by 3 nucleotides on the engineered guide RNA side of the guide-target RNA scaffold and 3 nucleotides on the target RNA side of the guide-target RNA scaffold. A symmetrical bulge of the present disclosure can be formed by 4 nucleotides on the engineered guide RNA side of the guide-target RNA scaffold and 4 nucleotides on the target RNA side of the guide-target RNA scaffold. Thus, a symmetrical bulge can be a structural feature formed from latent structure provided by an engineered latent guide RNA.

[0204] In some cases, a double stranded RNA (dsRNA) substrate (e.g., guide-target RNA scaffold) can be formed upon hybridization of an engineered guide RNA of the present disclosure to a target RNA. A bulge can be a symmetrical bulge or an asymmetrical bulge. An “asymmetrical bulge” is formed when a different number of nucleotides is present on each side of the bulge. For example, an asymmetrical bulge in a guide-target RNA scaffold of the present disclosure can have different numbers of nucleotides on the engineered guide RNA side and the target RNA side of the guide-target RNA scaffold. An asymmetrical bulge of the present disclosure can be formed by 0 nucleotides on the engineered guide RNA side of the guide-target RNA scaffold and 1 nucleotide on the target RNA side of the guide-target RNA scaffold. An asymmetrical bulge of the present disclosure can be formed by 0 nucleotides on the target RNA side of the guide-target RNA scaffold and 1 nucleotide on the engineered guide RNA side of the guide-target RNA scaffold. An asymmetrical bulge of the present disclosure can be formed by 0 nucleotides on the engineered guide RNA side of the guide-target RNA scaffold and 2 nucleotides on the target RNA side of the guide-target RNA scaffold. An asymmetrical bulge of the present disclosure can be formed by 0 nucleotides on the target RNA side of the guide-target RNA scaffold and 2 nucleotides on the engineered guide RNA side of the guide-target RNA scaffold. An asymmetrical bulge of the present disclosure can be formed by 0 nucleotides on the engineered guide RNA side of the guide-target RNA scaffold and 3 nucleotides on the target RNA side of the guide-target RNA scaffold. An asymmetrical bulge of the present disclosure can be formed by 0 nucleotides on the target RNA side of the guide-target RNA scaffold and 3 nucleotides on the engineered guide RNA side of the guide-target RNA scaffold. An asymmetrical bulge of the present disclosure can be formed by 0 nucleotides on the engineered guide RNA side of the guide-target RNA scaffold and 4 nucleotides on the target RNA side of the guide-target RNA scaffold. An asymmetrical bulge of the present disclosure can be formed by 0 nucleotides on the target RNA side of the guide-target RNA scaffold and 4 nucleotides on the engineered guide RNA side of the guide-target RNA scaffold. An asymmetrical bulge of the present disclosure can be formed by 1 nucleotide on the engineered guide RNA side of the guide-target RNA scaffold and 2 nucleotides on the target RNA side of the guide-target RNA scaffold. An asymmetrical bulge of the present disclosure can be formed by 1 nucleotide on the target RNA side of the guide-target RNA scaffold and 2 nucleotides on the engineered guide RNA side of the guide-target RNA scaffold. An asymmetrical bulge of the present disclosure can be formed by 1 nucleotide on the engineered guide RNA side of the guide-target RNA scaffold and 3 nucleotides on the target RNA side of the guide-target RNA scaffold. An asymmetrical bulge of the present disclosure can be formed by 1 nucleotide on the target RNA side of the guide-target RNA scaffold and 3 nucleotides on the engineered guide RNA side of the guide-target RNA scaffold. An asymmetrical bulge of the present disclosure can be formed by 1 nucleotide on the engineered guide RNA side of the guide-target RNA scaffold and 4 nucleotides on the target RNA side of the guide-target RNA scaffold. An asymmetrical bulge of the present disclosure can be formed by 1 nucleotide on the target RNA side of the guide-target RNA scaffold and 4 nucleotides on the engineered guide RNA side of the guide-target RNA scaffold. An asymmetrical bulge of the present disclosure can be formed by 2 nucleotides on the engineered guide RNA side of the guide-target RNA scaffold and 3 nucleotides on the target RNA side of the guide-target RNA scaffold. An asymmetrical bulge of the present disclosure can be formed by 2 nucleotides on the target RNA side of the guide-target RNA scaffold and 3 nucleotides on the engineered guide RNA side of the guide-target RNA scaffold. An asymmetrical bulge of the present disclosure can be formed by 2 nucleotides on the engineered guide RNA side of the guide-target RNA scaffold and 4 nucleotides on the target RNA side of the guide-target RNA scaffold. An asymmetrical bulge of the present disclosure can be formed by 2 nucleotides on the target RNA side of the guide-target RNA scaffold and 4 nucleotides on the engineered guide RNA side of the guide-target RNA scaffold. An asymmetrical bulge of the present disclosure can be formed by 3 nucleotides on the engineered guide RNA side of the guide-target RNA scaffold and 4 nucleotides on the target RNA side of the guide-target RNA scaffold. An asymmetrical bulge of the present disclosure can be formed by 3 nucleotides on the target RNA side of the guide-target RNA scaffold and 4 nucleotides on the engineered guide RNA side of the guide-target RNA scaffold. Thus, an asymmetrical bulge can be a structural feature formed from latent structure provided by an engineered latent guide RNA.

[0205] In an aspect, a double stranded RNA (dsRNA) substrate (e.g., guide-target RNA scaffold) can be formed upon hybridization of an engineered guide RNA of the present disclosure to a target RNA. An internal loop can be a symmetrical internal loop or an asymmetrical internal loop. As disclosed herein, an “internal loop” refers to the structure substantially formed only upon formation of the guide-target RNA scaffold, where nucleotides in either the engineered guide RNA or the target RNA are not complementary to their positional counterparts on the opposite strand and where one side of the internal loop, either on the target RNA side or the engineered guide RNA side of the guide-target RNA scaffold, has 5 nucleotides or more. Where the number of participating nucleotides on both the guide RNA side and the target RNA side drops below 5, the resulting structure is no longer considered an internal loop, but rather, is considered a bulge or a mismatch, depending on the size of the structural feature. An internal loop can be a symmetrical internal loop or an asymmetrical internal loop. Internal loops present in the vicinity of the edit site can help with base flipping of the target A in the target RNA to be edited.

[0206] In some embodiments, selective editing of the target A is achieved by positioning the target A between two loops (e.g., positioned between a 5′ end loop and a 3′ end loop, based on the engineered guide RNA). In some embodiments, one side of the internal loop, either on the target RNA side or the engineered polynucleotide side of the guide-target RNA scaffold, can be formed by from 5 to 150 nucleotides. One side of the internal loop can be formed by 5, 6, 7, 8, 9, 10, 11, 12, 13, 14, 15, 16, 17, 18, 19, 20, 25, 30, 35, 40, 45, 50, 55, 60, 65, 70, 75, 80, 85, 90, 95, 100, 105, 110, 115, 120, 125, 120, 135, 140, 145, 150, 200, 250, 300, 350, 400, 450, 500, 600, 700, 800, 900, or 1000 nucleotides, or any number of nucleotides therebetween. One side of the internal loop can be formed by 5 nucleotides. One side of the internal loop can be formed by 10 nucleotides. One side of the internal loop can be formed by 15 nucleotides. One side of the internal loop can be formed by 20 nucleotides. One side of the internal loop can be formed by 25 nucleotides. One side of the internal loop can be formed by 30 nucleotides. One side of the internal loop can be formed by 35 nucleotides. One side of the internal loop can be formed by 40 nucleotides. One side of the internal loop can be formed by 45 nucleotides. One side of the internal loop can be formed by 50 nucleotides. One side of the internal loop can be formed by 55 nucleotides. One side of the internal loop can be formed by 60 nucleotides. One side of the internal loop can be formed by 65 nucleotides. One side of the internal loop can be formed by 70 nucleotides. One side of the internal loop can be formed by 75 nucleotides. One side of the internal loop can be formed by 80 nucleotides. One side of the internal loop can be formed by 85 nucleotides. One side of the internal loop can be formed by 90 nucleotides. One side of the internal loop can be formed by 95 nucleotides. One side of the internal loop can be formed by 100 nucleotides. One side of the internal loop can be formed by 110 nucleotides. One side of the internal loop can be formed by 120 nucleotides. One side of the internal loop can be formed by 130 nucleotides. One side of the internal loop can be formed by 140 nucleotides. One side of the internal loop can be formed by 150 nucleotides. One side of the internal loop can be formed by 200 nucleotides. One side of the internal loop can be formed by 250 nucleotides. One side of the internal loop can be formed by 300 nucleotides. One side of the internal loop can be formed by 350 nucleotides. One side of the internal loop can be formed by 400 nucleotides. One side of the internal loop can be formed by 450 nucleotides. One side of the internal loop can be formed by 500 nucleotides. One side of the internal loop can be formed by 600 nucleotides. One side of the internal loop can be formed by 700 nucleotides. One side of the internal loop can be formed by 800 nucleotides. One side of the internal loop can be formed by 900 nucleotides. One side of the internal loop can be formed by 1000 nucleotides. Thus, an internal loop can be a structural feature formed from latent structure provided by an engineered latent guide RNA.

[0207] As described herein, a double stranded RNA (dsRNA) substrate (e.g., a guide-target RNA scaffold) is formed upon hybridization of an engineered guide RNA of the present disclosure to a target RNA. An internal loop can be a symmetrical internal loop or an asymmetrical internal loop. A “symmetrical internal loop” is formed when the same number of nucleotides is present on each side of the internal loop. For example, a symmetrical internal loop in a guide-target RNA scaffold of the present disclosure can have the same number of nucleotides on the engineered guide RNA side and the target RNA side of the guide-target RNA scaffold. A symmetrical internal loop of the present disclosure can be formed by 5 nucleotides on the engineered guide RNA side of the guide-target RNA scaffold target and 5 nucleotides on the target RNA side of the guide-target RNA scaffold. A symmetrical internal loop of the present disclosure can be formed by 6 nucleotides on the engineered guide RNA side of the guide-target RNA scaffold target and 6 nucleotides on the target RNA side of the guide-target RNA scaffold. A symmetrical internal loop of the present disclosure can be formed by 7 nucleotides on the engineered guide RNA side of the guide-target RNA scaffold target and 7 nucleotides on the target RNA side of the guide-target RNA scaffold. A symmetrical internal loop of the present disclosure can be formed by 8 nucleotides on the engineered guide RNA side of the guide-target RNA scaffold target and 8 nucleotides on the target RNA side of the guide-target RNA scaffold. A symmetrical internal loop of the present disclosure can be formed by 9 nucleotides on the engineered guide RNA side of the guide-target RNA scaffold target and 9 nucleotides on the target RNA side of the guide-target RNA scaffold. A symmetrical internal loop of the present disclosure can be formed by 10 nucleotides on the engineered guide RNA side of the guide-target RNA scaffold target and 10 nucleotides on the target RNA side of the guide-target RNA scaffold. A symmetrical internal loop of the present disclosure can be formed by 15 nucleotides on the engineered polynucleotide side of the guide-target RNA scaffold target and 15 nucleotides on the target RNA side of the guide-target RNA scaffold. A symmetrical internal loop of the present disclosure can be formed by 20 nucleotides on the engineered polynucleotide side of the guide-target RNA scaffold target and 20 nucleotides on the target RNA side of the guide-target RNA scaffold. A symmetrical internal loop of the present disclosure can be formed by 30 nucleotides on the engineered polynucleotide side of the guide-target RNA scaffold target and 30 nucleotides on the target RNA side of the guide-target RNA scaffold. A symmetrical internal loop of the present disclosure can be formed by 40 nucleotides on the engineered polynucleotide side of the guide-target RNA scaffold target and 40 nucleotides on the target RNA side of the guide-target RNA scaffold. A symmetrical internal loop of the present disclosure can be formed by 50 nucleotides on the engineered polynucleotide side of the guide-target RNA scaffold target and 50 nucleotides on the target RNA side of the guide-target RNA scaffold. A symmetrical internal loop of the present disclosure can be formed by 60 nucleotides on the engineered polynucleotide side of the guide-target RNA scaffold target and 60 nucleotides on the target RNA side of the guide-target RNA scaffold. A symmetrical internal loop of the present disclosure can be formed by 70 nucleotides on the engineered polynucleotide side of the guide-target RNA scaffold target and 70 nucleotides on the target RNA side of the guide-target RNA scaffold. A symmetrical internal loop of the present disclosure can be formed by 80 nucleotides on the engineered polynucleotide side of the guide-target RNA scaffold target and 80 nucleotides on the target RNA side of the guide-target RNA scaffold. A symmetrical internal loop of the present disclosure can be formed by 90 nucleotides on the engineered polynucleotide side of the guide-target RNA scaffold target and 90 nucleotides on the target RNA side of the guide-target RNA scaffold. A symmetrical internal loop of the present disclosure can be formed by 100 nucleotides on the engineered polynucleotide side of the guide-target RNA scaffold target and 100 nucleotides on the target RNA side of the guide-target RNA scaffold. A symmetrical internal loop of the present disclosure can be formed by 110 nucleotides on the engineered polynucleotide side of the guide-target RNA scaffold target and 110 nucleotides on the target RNA side of the guide-target RNA scaffold. A symmetrical internal loop of the present disclosure can be formed by 120 nucleotides on the engineered polynucleotide side of the guide-target RNA scaffold target and 120 nucleotides on the target RNA side of the guide-target RNA scaffold. A symmetrical internal loop of the present disclosure can be formed by 130 nucleotides on the engineered polynucleotide side of the guide-target RNA scaffold target and 130 nucleotides on the target RNA side of the guide-target RNA scaffold. A symmetrical internal loop of the present disclosure can be formed by 140 nucleotides on the engineered polynucleotide side of the guide-target RNA scaffold target and 140 nucleotides on the target RNA side of the guide-target RNA scaffold. A symmetrical internal loop of the present disclosure can be formed by 150 nucleotides on the engineered polynucleotide side of the guide-target RNA scaffold target and 150 nucleotides on the target RNA side of the guide-target RNA scaffold. A symmetrical internal loop of the present disclosure can be formed by 200 nucleotides on the engineered polynucleotide side of the guide-target RNA scaffold target and 200 nucleotides on the target RNA side of the guide-target RNA scaffold. A symmetrical internal loop of the present disclosure can be formed by 250 nucleotides on the engineered polynucleotide side of the guide-target RNA scaffold target and 250 nucleotides on the target RNA side of the guide-target RNA scaffold. A symmetrical internal loop of the present disclosure can be formed by 300 nucleotides on the engineered polynucleotide side of the guide-target RNA scaffold target and 300 nucleotides on the target RNA side of the guide-target RNA scaffold. A symmetrical internal loop of the present disclosure can be formed by 350 nucleotides on the engineered polynucleotide side of the guide-target RNA scaffold target and 350 nucleotides on the target RNA side of the guide-target RNA scaffold. A symmetrical internal loop of the present disclosure can be formed by 400 nucleotides on the engineered polynucleotide side of the guide-target RNA scaffold target and 400 nucleotides on the target RNA side of the guide-target RNA scaffold. A symmetrical internal loop of the present disclosure can be formed by 450 nucleotides on the engineered polynucleotide side of the guide-target RNA scaffold target and 450 nucleotides on the target RNA side of the guide-target RNA scaffold. A symmetrical internal loop of the present disclosure can be formed by 500 nucleotides on the engineered polynucleotide side of the guide-target RNA scaffold target and 500 nucleotides on the target RNA side of the guide-target RNA scaffold. A symmetrical internal loop of the present disclosure can be formed by 600 nucleotides on the engineered polynucleotide side of the guide-target RNA scaffold target and 600 nucleotides on the target RNA side of the guide-target RNA scaffold. A symmetrical internal loop of the present disclosure can be formed by 700 nucleotides on the engineered polynucleotide side of the guide-target RNA scaffold target and 700 nucleotides on the target RNA side of the guide-target RNA scaffold. A symmetrical internal loop of the present disclosure can be formed by 800 nucleotides on the engineered polynucleotide side of the guide-target RNA scaffold target and 800 nucleotides on the target RNA side of the guide-target RNA scaffold. A symmetrical internal loop of the present disclosure can be formed by 900 nucleotides on the engineered polynucleotide side of the guide-target RNA scaffold target and 900 nucleotides on the target RNA side of the guide-target RNA scaffold. A symmetrical internal loop of the present disclosure can be formed by 1000 nucleotides on the engineered polynucleotide side of the guide-target RNA scaffold target and 1000 nucleotides on the target RNA side of the guide-target RNA scaffold. Thus, a symmetrical internal loop can be a structural feature formed from latent structure provided by an engineered latent guide RNA.

[0208] In some embodiments, the target A is positioned between the two loops, and is at least 1, 2, 3, 4, 5, 6, 7, 8, 9, 10, 11, 12, 13, 14, 15, 16, 17, 18, 19, 20, 21, 22, 23, 24, 25, 26, 27, 28, 29, 30, 31, 32, 33, 34, 35, 36, 37, 38, 39, 40, 41, 42, 43, 44, 45, 46, 47, 48, 49, 50, 51, 52, 53, 54, 55, 56, 57, 58, 59, 60, 61, 62, 63, 64, 65, 66, 67, 68, 69, 70, 71, 72, 73, 74, 75, 76, 77, 78, 79, 80, 81, 82, 83, 84, 85, 86, 87, 88, 89, 90, 91, 92, 93, 94, 95, 96, 97, 98, 99, 100, 101, 102, 103, 104, 105, 106, 107, 108, 109, 110, 111, 112, 113, 114, 115, 116, 117, 118, 119, 120, 121, 122, 123, 124, 125, 126, 127, 128, 129, 130, 131, 132, 133, 134, 135, 136, 137, 138, 139, 140, 141, 142, 143, 144, 145, 146, 147, 148, 149, 150, 151, 152, 153, 154, 155, 156, 157, 158, 159, 160, 161, 162, 163, 164, 165, 166, 167, 168, 169, 170, 171, 172, 173, 174, 175, 176, 177, 178, 179, 180, 181, 182, 183, 184, 185, 186, 187, 188, 189, 190, 191, 192, 193, 194, 195, 196, 197, 198, 199, 200, 201, 202, 203, 204, 205, 206, 207, 208, 209, 210, 211, 212, 213, 214, 215, 216, 217, 218, 219, 220, 221, 222, 223, 224, 225, 226, 227, 228, 229, 230, 231, 232, 233, 234, 235, 236, 237, 238, 239, 240, 241, 242, 243, 244, 245, 246, 247, 248, 249, 250, 251, 252, 253, 254, 255, 256, 257, 258, 259, 260, 261, 262, 263, 264, 265, 266, 267, 268, 269, 270, 271, 272, 273, 274, 275, 276, 277, 278, 279, 280, 281, 282, 283, 284, 285, 286, 287, 288, 289, 290, 291, 292, 293, 294, 295, 296, 297, 298, 299, 300, 301, 302, 303, 304, 305, 306, 307, 308, 309, 310, 311, 312, 313, 314, 315, 316, 317, 318, 319, 320, 321, 322, 323, 324, 325, 326, 327, 328, 329, 330, 331, 332, 333, 334, 335, 336, 337, 338, 339, 340, 341, 342, 343, 344, 345, 346, 347, 348, 349, 350, 351, 352, 353, 354, 355, 356, 357, 358, 359, 360, 361, 362, 363, 364, 365, 366, 367, 368, 369, 370, 371, 372, 373, 374, 375, 376, 377, 378, 379, 380, 381, 382, 383, 384, 385, 386, 387, 388, 389, 390, 391, 392, 393, 394, 395, 396, 397, 398, 399, or 400 nucleotides from a loop (e.g., from a 5′ end loop or a 3′ end loop). In some embodiments, additional structural features are located between the loops (e.g., between the 5′ end loop and the 3′ end loop). In some embodiments, a mismatch in a loop comprises a nucleotide base for editing in the target RNA (e.g., an A/C mismatch in the loop, wherein part of the loop in the engineered guide RNA comprises a C mismatched to an A in the part of the loop in the target RNA, and the A is edited).

[0209] As disclosed herein, a double-stranded RNA (dsRNA) substrate (e.g., a guide-target RNA scaffold) is formed upon hybridization of an engineered guide RNA of the present disclosure to a target RNA. An internal loop can be a symmetrical internal loop or an asymmetrical internal loop. An “asymmetrical internal loop” is formed when a different number of nucleotides is present on each side of the internal loop. For example, an asymmetrical internal loop in a guide-target RNA scaffold of the present disclosure can have different numbers of nucleotides on the engineered guide RNA side and the target RNA side of the guide-target RNA scaffold.

[0210] An asymmetrical internal loop of the present disclosure can be formed by from 5 to 150 nucleotides on the engineered polynucleotide side of the guide-target RNA scaffold and from 5 to 150 nucleotides on the target RNA side of the guide-target RNA scaffold, wherein the number of nucleotides is the different on the engineered side of the guide-target RNA scaffold target than the number of nucleotides on the target RNA side of the guide-target RNA scaffold. An asymmetrical internal loop of the present disclosure can be formed by from 5 to 1000 nucleotides on the engineered polynucleotide side of the guide-target RNA scaffold and from 5 to 1000 nucleotides on the target RNA side of the guide-target RNA scaffold, wherein the number of nucleotides is the different on the engineered side of the guide-target RNA scaffold target than the number of nucleotides on the target RNA side of the guide-target RNA scaffold. An asymmetrical internal loop of the present disclosure can be formed by 5 nucleotides on the engineered guide RNA side of the guide-target RNA scaffold and 6 nucleotides on the target RNA side of the guide-target RNA scaffold. An asymmetrical internal loop of the present disclosure can be formed by 5 nucleotides on the target RNA side of the guide-target RNA scaffold and 6 nucleotides on the engineered guide RNA side of the guide-target RNA scaffold. An asymmetrical internal loop of the present disclosure can be formed by 5 nucleotides on the engineered guide RNA side of the guide-target RNA scaffold and 7 nucleotides on the target RNA side of the guide-target RNA scaffold. An asymmetrical internal loop of the present disclosure can be formed by 5 nucleotides on the target RNA side of the guide-target RNA scaffold and 7 nucleotides on the engineered guide RNA side of the guide-target RNA scaffold. An asymmetrical internal loop of the present disclosure can be formed by 5 nucleotides on the engineered guide RNA side of the guide-target RNA scaffold and 8 nucleotides internal loop the target RNA side of the guide-target RNA scaffold. An asymmetrical internal loop of the present disclosure can be formed by 5 nucleotides on the target RNA side of the guide-target RNA scaffold and 8 nucleotides on the engineered guide RNA side of the guide-target RNA scaffold. An asymmetrical internal loop of the present disclosure can be formed by 5 nucleotides on the engineered guide RNA side of the guide-target RNA scaffold and 9 nucleotides internal loop the target RNA side of the guide-target RNA scaffold. An asymmetrical internal loop of the present disclosure can be formed by 5 nucleotides on the target RNA side of the guide-target RNA scaffold and 9 nucleotides on the engineered guide RNA side of the guide-target RNA scaffold. An asymmetrical internal loop of the present disclosure can be formed by 5 nucleotides on the engineered guide RNA side of the guide-target RNA scaffold and 10 nucleotides internal loop the target RNA side of the guide-target RNA scaffold. An asymmetrical internal loop of the present disclosure can be formed by 5 nucleotides on the target RNA side of the guide-target RNA scaffold and 10 nucleotides on the engineered guide RNA side of the guide-target RNA scaffold. An asymmetrical internal loop of the present disclosure can be formed by 6 nucleotides on the engineered guide RNA side of the guide-target RNA scaffold and 7 nucleotides internal loop the target RNA side of the guide-target RNA scaffold. An asymmetrical internal loop of the present disclosure can be formed by 6 nucleotides on the target RNA side of the guide-target RNA scaffold and 7 nucleotides on the engineered guide RNA side of the guide-target RNA scaffold. An asymmetrical internal loop of the present disclosure can be formed by 6 nucleotides on the engineered guide RNA side of the guide-target RNA scaffold and 8 nucleotides internal loop the target RNA side of the guide-target RNA scaffold. An asymmetrical internal loop of the present disclosure can be formed by 6 nucleotides on the target RNA side of the guide-target RNA scaffold and 8 nucleotides on the engineered guide RNA side of the guide-target RNA scaffold. An asymmetrical internal loop of the present disclosure can be formed by 6 nucleotides on the engineered guide RNA side of the guide-target RNA scaffold and 9 nucleotides internal loop the target RNA side of the guide-target RNA scaffold. An asymmetrical internal loop of the present disclosure can be formed by 6 nucleotides on the target RNA side of the guide-target RNA scaffold and 9 nucleotides on the engineered guide RNA side of the guide-target RNA scaffold. An asymmetrical internal loop of the present disclosure can be formed by 6 nucleotides on the engineered guide RNA side of the guide-target RNA scaffold and 10 nucleotides internal loop the target RNA side of the guide-target RNA scaffold. An asymmetrical internal loop of the present disclosure can be formed by 6 nucleotides on the target RNA side of the guide-target RNA scaffold and 10 nucleotides on the engineered guide RNA side of the guide-target RNA scaffold. An asymmetrical internal loop of the present disclosure can be formed by 7 nucleotides on the engineered guide RNA side of the guide-target RNA scaffold and 8 nucleotides internal loop the target RNA side of the guide-target RNA scaffold. An asymmetrical internal loop of the present disclosure can be formed by 7 nucleotides on the target RNA side of the guide-target RNA scaffold and 8 nucleotides on the engineered guide RNA side of the guide-target RNA scaffold. An asymmetrical internal loop of the present disclosure can be formed by 7 nucleotides on the engineered guide RNA side of the guide-target RNA scaffold and 9 nucleotides internal loop the target RNA side of the guide-target RNA scaffold. An asymmetrical internal loop of the present disclosure can be formed by 7 nucleotides on the target RNA side of the guide-target RNA scaffold and 9 nucleotides on the engineered guide RNA side of the guide-target RNA scaffold. An asymmetrical internal loop of the present disclosure can be formed by 7 nucleotides on the engineered guide RNA side of the guide-target RNA scaffold and 10 nucleotides internal loop the target RNA side of the guide-target RNA scaffold. An asymmetrical internal loop of the present disclosure can be formed by 7 nucleotides on the target RNA side of the guide-target RNA scaffold and 10 nucleotides on the engineered guide RNA side of the guide-target RNA scaffold. An asymmetrical internal loop of the present disclosure can be formed by 8 nucleotides on the engineered guide RNA side of the guide-target RNA scaffold and 9 nucleotides internal loop the target RNA side of the guide-target RNA scaffold. An asymmetrical internal loop of the present disclosure can be formed by 8 nucleotides on the target RNA side of the guide-target RNA scaffold and 9 nucleotides on the engineered guide RNA side of the guide-target RNA scaffold. An asymmetrical internal loop of the present disclosure can be formed by 8 nucleotides on the engineered guide RNA side of the guide-target RNA scaffold and 10 nucleotides internal loop the target RNA side of the guide-target RNA scaffold. An asymmetrical internal loop of the present disclosure can be formed by 8 nucleotides on the target RNA side of the guide-target RNA scaffold and 10 nucleotides on the engineered guide RNA side of the guide-target RNA scaffold. An asymmetrical internal loop of the present disclosure can be formed by 9 nucleotides on the engineered guide RNA side of the guide-target RNA scaffold and 10 nucleotides internal loop the target RNA side of the guide-target RNA scaffold. An asymmetrical internal loop of the present disclosure can be formed by 9 nucleotides on the target RNA side of the guide-target RNA scaffold and 10 nucleotides on the engineered guide RNA side of the guide-target RNA scaffold. An asymmetrical internal loop of the present disclosure can be formed by 5 nucleotides on the target RNA side of the guide-target RNA scaffold and 50 nucleotides on the engineered polynucleotide side of the guide-target RNA scaffold. An asymmetrical internal loop of the present disclosure can be formed by 5 nucleotides on the target RNA side of the guide-target RNA scaffold and 100 nucleotides on the engineered polynucleotide side of the guide-target RNA scaffold. An asymmetrical internal loop of the present disclosure can be formed by 5 nucleotides on the target RNA side of the guide-target RNA scaffold and 150 nucleotides on the engineered polynucleotide side of the guide-target RNA scaffold. An asymmetrical internal loop of the present disclosure can be formed by 5 nucleotides on the target RNA side of the guide-target RNA scaffold and 200 nucleotides on the engineered polynucleotide side of the guide-target RNA scaffold. An asymmetrical internal loop of the present disclosure can be formed by 5 nucleotides on the target RNA side of the guide-target RNA scaffold and 300 nucleotides on the engineered polynucleotide side of the guide-target RNA scaffold. An asymmetrical internal loop of the present disclosure can be formed by 5 nucleotides on the target RNA side of the guide-target RNA scaffold and 400 nucleotides on the engineered polynucleotide side of the guide-target RNA scaffold. An asymmetrical internal loop of the present disclosure can be formed by 5 nucleotides on the target RNA side of the guide-target RNA scaffold and 500 nucleotides on the engineered polynucleotide side of the guide-target RNA scaffold. An asymmetrical internal loop of the present disclosure can be formed by 5 nucleotides on the target RNA side of the guide-target RNA scaffold and 1000 nucleotides on the engineered polynucleotide side of the guide-target RNA scaffold. An asymmetrical internal loop of the present disclosure can be formed by 1000 nucleotides on the target RNA side of the guide-target RNA scaffold and 5 nucleotides on the engineered polynucleotide side of the guide-target RNA scaffold. An asymmetrical internal loop of the present disclosure can be formed by 500 nucleotides on the target RNA side of the guide-target RNA scaffold and 5 nucleotides on the engineered polynucleotide side of the guide-target RNA scaffold. An asymmetrical internal loop of the present disclosure can be formed by 400 nucleotides on the target RNA side of the guide-target RNA scaffold and 5 nucleotides on the engineered polynucleotide side of the guide-target RNA scaffold. An asymmetrical internal loop of the present disclosure can be formed by 300 nucleotides on the target RNA side of the guide-target RNA scaffold and 5 nucleotides on the engineered polynucleotide side of the guide-target RNA scaffold. An asymmetrical internal loop of the present disclosure can be formed by 200 nucleotides on the target RNA side of the guide-target RNA scaffold and 5 nucleotides on the engineered polynucleotide side of the guide-target RNA scaffold. An asymmetrical internal loop of the present disclosure can be formed by 150 nucleotides on the target RNA side of the guide-target RNA scaffold and 5 nucleotides on the engineered polynucleotide side of the guide-target RNA scaffold. An asymmetrical internal loop of the present disclosure can be formed by 100 nucleotides on the target RNA side of the guide-target RNA scaffold and 5 nucleotides on the engineered polynucleotide side of the guide-target RNA scaffold. An asymmetrical internal loop of the present disclosure can be formed by 50 nucleotides on the target RNA side of the guide-target RNA scaffold and 5 nucleotides on the engineered polynucleotide side of the guide-target RNA scaffold. An asymmetrical internal loop of the present disclosure can be formed by 50 nucleotides on the target RNA side of the guide-target RNA scaffold and 100 nucleotides on the engineered polynucleotide side of the guide-target RNA scaffold. An asymmetrical internal loop of the present disclosure can be formed by 50 nucleotides on the target RNA side of the guide-target RNA scaffold and 150 nucleotides on the engineered polynucleotide side of the guide-target RNA scaffold. An asymmetrical internal loop of the present disclosure can be formed by 50 nucleotides on the target RNA side of the guide-target RNA scaffold and 200 nucleotides on the engineered polynucleotide side of the guide-target RNA scaffold. An asymmetrical internal loop of the present disclosure can be formed by 50 nucleotides on the target RNA side of the guide-target RNA scaffold and 300 nucleotides on the engineered polynucleotide side of the guide-target RNA scaffold. An asymmetrical internal loop of the present disclosure can be formed by 50 nucleotides on the target RNA side of the guide-target RNA scaffold and 400 nucleotides on the engineered polynucleotide side of the guide-target RNA scaffold. An asymmetrical internal loop of the present disclosure can be formed by 50 nucleotides on the target RNA side of the guide-target RNA scaffold and 500 nucleotides on the engineered polynucleotide side of the guide-target RNA scaffold. An asymmetrical internal loop of the present disclosure can be formed by 50 nucleotides on the target RNA side of the guide-target RNA scaffold and 1000 nucleotides on the engineered polynucleotide side of the guide-target RNA scaffold. An asymmetrical internal loop of the present disclosure can be formed by 1000 nucleotides on the target RNA side of the guide-target RNA scaffold and 50 nucleotides on the engineered polynucleotide side of the guide-target RNA scaffold. An asymmetrical internal loop of the present disclosure can be formed by 500 nucleotides on the target RNA side of the guide-target RNA scaffold and 50 nucleotides on the engineered polynucleotide side of the guide-target RNA scaffold. An asymmetrical internal loop of the present disclosure can be formed by 400 nucleotides on the target RNA side of the guide-target RNA scaffold and 50 nucleotides on the engineered polynucleotide side of the guide-target RNA scaffold. An asymmetrical internal loop of the present disclosure can be formed by 300 nucleotides on the target RNA side of the guide-target RNA scaffold and 50 nucleotides on the engineered polynucleotide side of the guide-target RNA scaffold. An asymmetrical internal loop of the present disclosure can be formed by 200 nucleotides on the target RNA side of the guide-target RNA scaffold and 50 nucleotides on the engineered polynucleotide side of the guide-target RNA scaffold. An asymmetrical internal loop of the present disclosure can be formed by 150 nucleotides on the target RNA side of the guide-target RNA scaffold and 50 nucleotides on the engineered polynucleotide side of the guide-target RNA scaffold. An asymmetrical internal loop of the present disclosure can be formed by 100 nucleotides on the target RNA side of the guide-target RNA scaffold and 50 nucleotides on the engineered polynucleotide side of the guide-target RNA scaffold. An asymmetrical internal loop of the present disclosure can be formed by 100 nucleotides on the target RNA side of the guide-target RNA scaffold and 150 nucleotides on the engineered polynucleotide side of the guide-target RNA scaffold. An asymmetrical internal loop of the present disclosure can be formed by 100 nucleotides on the target RNA side of the guide-target RNA scaffold and 200 nucleotides on the engineered polynucleotide side of the guide-target RNA scaffold. An asymmetrical internal loop of the present disclosure can be formed by 100 nucleotides on the target RNA side of the guide-target RNA scaffold and 300 nucleotides on the engineered polynucleotide side of the guide-target RNA scaffold. An asymmetrical internal loop of the present disclosure can be formed by 100 nucleotides on the target RNA side of the guide-target RNA scaffold and 400 nucleotides on the engineered polynucleotide side of the guide-target RNA scaffold. An asymmetrical internal loop of the present disclosure can be formed by 100 nucleotides on the target RNA side of the guide-target RNA scaffold and 500 nucleotides on the engineered polynucleotide side of the guide-target RNA scaffold. An asymmetrical internal loop of the present disclosure can be formed by 100 nucleotides on the target RNA side of the guide-target RNA scaffold and 1000 nucleotides on the engineered polynucleotide side of the guide-target RNA scaffold. An asymmetrical internal loop of the present disclosure can be formed by 1000 nucleotides on the target RNA side of the guide-target RNA scaffold and 100 nucleotides on the engineered polynucleotide side of the guide-target RNA scaffold. An asymmetrical internal loop of the present disclosure can be formed by 500 nucleotides on the target RNA side of the guide-target RNA scaffold and 100 nucleotides on the engineered polynucleotide side of the guide-target RNA scaffold. An asymmetrical internal loop of the present disclosure can be formed by 400 nucleotides on the target RNA side of the guide-target RNA scaffold and 100 nucleotides on the engineered polynucleotide side of the guide-target RNA scaffold. An asymmetrical internal loop of the present disclosure can be formed by 300 nucleotides on the target RNA side of the guide-target RNA scaffold and 100 nucleotides on the engineered polynucleotide side of the guide-target RNA scaffold. An asymmetrical internal loop of the present disclosure can be formed by 200 nucleotides on the target RNA side of the guide-target RNA scaffold and 100 nucleotides on the engineered polynucleotide side of the guide-target RNA scaffold. An asymmetrical internal loop of the present disclosure can be formed by 150 nucleotides on the target RNA side of the guide-target RNA scaffold and 100 nucleotides on the engineered polynucleotide side of the guide-target RNA scaffold. An asymmetrical internal loop of the present disclosure can be formed by 150 nucleotides on the target RNA side of the guide-target RNA scaffold and 200 nucleotides on the engineered polynucleotide side of the guide-target RNA scaffold. An asymmetrical internal loop of the present disclosure can be formed by 150 nucleotides on the target RNA side of the guide-target RNA scaffold and 300 nucleotides on the engineered polynucleotide side of the guide-target RNA scaffold. An asymmetrical internal loop of the present disclosure can be formed by 150 nucleotides on the target RNA side of the guide-target RNA scaffold and 400 nucleotides on the engineered polynucleotide side of the guide-target RNA scaffold. An asymmetrical internal loop of the present disclosure can be formed by 150 nucleotides on the target RNA side of the guide-target RNA scaffold and 500 nucleotides on the engineered polynucleotide side of the guide-target RNA scaffold. An asymmetrical internal loop of the present disclosure can be formed by 150 nucleotides on the target RNA side of the guide-target RNA scaffold and 1000 nucleotides on the engineered polynucleotide side of the guide-target RNA scaffold. An asymmetrical internal loop of the present disclosure can be formed by 1000 nucleotides on the target RNA side of the guide-target RNA scaffold and 150 nucleotides on the engineered polynucleotide side of the guide-target RNA scaffold. An asymmetrical internal loop of the present disclosure can be formed by 500 nucleotides on the target RNA side of the guide-target RNA scaffold and 5 nucleotides on the engineered polynucleotide side of the guide-target RNA scaffold. An asymmetrical internal loop of the present disclosure can be formed by 400 nucleotides on the target RNA side of the guide-target RNA scaffold and 150 nucleotides on the engineered polynucleotide side of the guide-target RNA scaffold. An asymmetrical internal loop of the present disclosure can be formed by 300 nucleotides on the target RNA side of the guide-target RNA scaffold and 150 nucleotides on the engineered polynucleotide side of the guide-target RNA scaffold. An asymmetrical internal loop of the present disclosure can be formed by 200 nucleotides on the target RNA side of the guide-target RNA scaffold and 300 nucleotides on the engineered polynucleotide side of the guide-target RNA scaffold. An asymmetrical internal loop of the present disclosure can be formed by 200 nucleotides on the target RNA side of the guide-target RNA scaffold and 400 nucleotides on the engineered polynucleotide side of the guide-target RNA scaffold. An asymmetrical internal loop of the present disclosure can be formed by 200 nucleotides on the target RNA side of the guide-target RNA scaffold and 500 nucleotides on the engineered polynucleotide side of the guide-target RNA scaffold. An asymmetrical internal loop of the present disclosure can be formed by 200 nucleotides on the target RNA side of the guide-target RNA scaffold and 1000 nucleotides on the engineered polynucleotide side of the guide-target RNA scaffold. An asymmetrical internal loop of the present disclosure can be formed by 1000 nucleotides on the target RNA side of the guide-target RNA scaffold and 200 nucleotides on the engineered polynucleotide side of the guide-target RNA scaffold. An asymmetrical internal loop of the present disclosure can be formed by 500 nucleotides on the target RNA side of the guide-target RNA scaffold and 200 nucleotides on the engineered polynucleotide side of the guide-target RNA scaffold. An asymmetrical internal loop of the present disclosure can be formed by 400 nucleotides on the target RNA side of the guide-target RNA scaffold and 200 nucleotides on the engineered polynucleotide side of the guide-target RNA scaffold. An asymmetrical internal loop of the present disclosure can be formed by 300 nucleotides on the target RNA side of the guide-target RNA scaffold and 200 nucleotides on the engineered polynucleotide side of the guide-target RNA scaffold. An asymmetrical internal loop of the present disclosure can be formed by 300 nucleotides on the target RNA side of the guide-target RNA scaffold and 400 nucleotides on the engineered polynucleotide side of the guide-target RNA scaffold. An asymmetrical internal loop of the present disclosure can be formed by 300 nucleotides on the target RNA side of the guide-target RNA scaffold and 500 nucleotides on the engineered polynucleotide side of the guide-target RNA scaffold. An asymmetrical internal loop of the present disclosure can be formed by 300 nucleotides on the target RNA side of the guide-target RNA scaffold and 1000 nucleotides on the engineered polynucleotide side of the guide-target RNA scaffold. An asymmetrical internal loop of the present disclosure can be formed by 1000 nucleotides on the target RNA side of the guide-target RNA scaffold and 300 nucleotides on the engineered polynucleotide side of the guide-target RNA scaffold. An asymmetrical internal loop of the present disclosure can be formed by 500 nucleotides on the target RNA side of the guide-target RNA scaffold and 300 nucleotides on the engineered polynucleotide side of the guide-target RNA scaffold. An asymmetrical internal loop of the present disclosure can be formed by 400 nucleotides on the target RNA side of the guide-target RNA scaffold and 300 nucleotides on the engineered polynucleotide side of the guide-target RNA scaffold. An asymmetrical internal loop of the present disclosure can be formed by 400 nucleotides on the target RNA side of the guide-target RNA scaffold and 500 nucleotides on the engineered polynucleotide side of the guide-target RNA scaffold. An asymmetrical internal loop of the present disclosure can be formed by 400 nucleotides on the target RNA side of the guide-target RNA scaffold and 1000 nucleotides on the engineered polynucleotide side of the guide-target RNA scaffold. An asymmetrical internal loop of the present disclosure can be formed by 1000 nucleotides on the target RNA side of the guide-target RNA scaffold and 400 nucleotides on the engineered polynucleotide side of the guide-target RNA scaffold. An asymmetrical internal loop of the present disclosure can be formed by 500 nucleotides on the target RNA side of the guide-target RNA scaffold and 400 nucleotides on the engineered polynucleotide side of the guide-target RNA scaffold. An asymmetrical internal loop of the present disclosure can be formed by 500 nucleotides on the target RNA side of the guide-target RNA scaffold and 1000 nucleotides on the engineered polynucleotide side of the guide-target RNA scaffold. An asymmetrical internal loop of the present disclosure can be formed by 1000 nucleotides on the target RNA side of the guide-target RNA scaffold and 500 nucleotides on the engineered polynucleotide side of the guide-target RNA scaffold. Thus, an asymmetrical internal loop can be a structural feature formed from latent structure provided by an engineered latent guide RNA.

[0211] Structural features that comprise a loop can be of any size 5 bases or greater. In some cases, a loop comprises at least: 5, 6, 7, 8, 9, 10, 11, 12, 13, 14, 15, 16, 17, 18, 19, 20, 21, 22, 23, 24, 25, 26, 27, 28, 29, 30, 31, 32, 33, 34, 35, 36, 37, 38, 39, 40, 41, 42, 43, 44, 45, 46, 47, 48, 49, 50, 51, 52, 53, 54, 55, 56, 57, 58, 59, 60, 61, 62, 63, 64, 65, 66, 67, 68, 69, 70, 71, 72, 73, 74, 75, 76, 77, 78, 79, 80, 81, 82, 83, 84, 85, 86, 87, 88, 89, 90, 91, 92, 93, 94, 95, 96, 97, 98, 99, 100, 101, 102, 103, 104, 105, 106, 107, 108, 109, 110, 111, 112, 113, 114, 115, 116, 117, 118, 119, 120, 121, 122, 123, 124, 125, 126, 127, 128, 129, 130, 131, 132, 133, 134, 135, 136, 137, 138, 139, 140, 141, 142, 143, 144, 145, 146, 147, 148, 149, 150, 200, 250, 300, 350, 400, 450, 500, 600, 700, 800, 900, or 1000 bases. In some cases, a loop comprises at least about 5-10, 5-15, 10-20, 15-25, 20-30, 5-30, 5-40, 5-50, 5-60, 5-70, 5-80, 5-90, 5-100, 5-110, 5-120, 5-130, 5-140, 5-150, 5-200, 5-250, 5-300, 5-350, 5-400, 5-450, 5-500, 5-600, 5-700, 5-800, 5-900, 5-1000, 20-50, 20-60, 20-70, 20-80, 20-90, 20-100, 20-110, 20-120, 20-130, 20-140, 20-150, 30-40, 30-50, 30-60, 30-70, 30-80, 30-90, 30-100, 30-110, 30-120, 30-130, 30-140, 30-150, 30-200, 30-250, 30-300, 30-350, 30-400, 30-450, 30-500, 30-600, 30-700, 30-800, 30-900, 30-1000, 40-50, 40-60, 40-70, 40-80, 40-90, 40-100, 40-110, 40-120, 40-130, 40-140, 40-150, 40-200, 40-250, 40-300, 40-350, 40-400, 40-450, 40-500, 40-600, 40-700, 40-800, 40-900, 40-1000, 50-60, 50-70, 50-80, 50-90, 50-100, 50-110, 50-120, 50-130, 50-140, 50-150, 50-200, 50-250, 50-300, 50-350, 50-400, 50-450, 50-500, 50-600, 50-700, 50-800, 50-900, 50-1000, 60-70, 60-80, 60-90, 60-100, 60-110, 60-120, 60-130, 60-140, 60-150, 60-200, 60-250, 60-300, 60-350, 60-400, 60-450, 60-500, 60-600, 60-700, 60-800, 60-900, 60-1000, 70-80, 70-90, 70-100, 70-110, 70-120, 70-130, 70-140, 70-150, 70-200, 70-250, 70-300, 70-350, 70-400, 70-450, 70-500, 70-600, 70-700, 70-800, 70-900, 70-1000, 80-90, 80-100, 80-110, 80-120, 80-130, 80-140, 80-150, 80-200, 80-250, 80-300, 80-350, 80-400, 80-450, 80-500, 80-600, 80-700, 80-800, 80-900, 80-1000, 90-100, 90-110, 90-120, 90-130, 90-140, 90-150, 90-200, 90-250, 90-300, 90-350, 90-400, 90-450, 90-500, 90-600, 90-700, 90-800, 90-900, 90-1000, 100-110, 100-120, 100-130, 100-140, 100-150, 100-200, 100-250, 100-300, 100-350, 100-400, 100-450, 100-500, 100-600, 100-700, 100-800, 100-900, 100-1000, 110-120, 110-130, 110-140, 110-150, 110-200, 110-250, 110-300, 110-350, 110-400, 110-450, 110-500, 110-600, 110-700, 110-800, 110-900, 110-1000, 120-130, 120-140, 120-150, 120-200, 120-250, 120-300, 120-350, 120-400, 120-450, 120-500, 120-600, 120-700, 120-800, 120-900, 120-1000, 130-140, 130-150, 130-200, 130-250, 130-300, 130-350, 130-400, 130-450, 130-500, 130-600, 130-700, 130-800, 130-900, 130-1000, 140-150, 140-200, 140-250, 140-300, 140-350, 140-400, 140-450, 140-500, 140-600, 140-700, 140-800, 140-900, 140-1000, 150-200, 150-250, 150-300, 150-350, 150-400, 150-450, 150-500, 150-600, 150-700, 150-800, 150-900, 150-1000, 200-250, 200-300, 200-350, 200-400, 200-450, 200-500, 200-600, 200-700, 200-800, 200-900, 200-1000, 250-300, 250-350, 250-400, 250-450, 250-500, 250-600, 250-700, 250-800, 250-900, 250-1000, 300-350, 300-400, 300-450, 300-500, 300-600, 300-700, 300-800, 300-900, 300-1000, 350-400, 350-450, 350-500, 350-600, 350-700, 350-800, 350-900, 350-1000, 400-450, 400-500, 400-600, 400-700, 400-800, 400-900, 400-1000, 500-600, 500-700, 500-800, 500-900, 500-1000, 600-700, 600-800, 600-900, 600-1000, 700-800, 700-900, 700-1000, 800-900, 800-1000, or 900-1000 bases in total.

[0212] In some examples, a double stranded RNA (dsRNA) substrate (e.g., a guide-target RNA scaffold) is formed upon hybridization of an engineered guide of the present disclosure to a target RNA. In some examples, the guide-target RNA scaffold comprises structural features mimicking the structural features of a naturally occurring ADAR substrate. In some examples, the naturally occurring ADAR substrate can be a Drosophila ADAR substrate. In some examples, the naturally occurring Drosophila ADAR substrate can be as depicted in FIGS. 3 and 4 and comprises two bulges. The specific nucleotide interactions forming the structural features of the Drosophila substrate are annotated on the sequences listed in FIG. 4 and include (1) an A to C mismatch, (2) a G mismatch of a 5′ G, (3) two wobble base pairs, (4) a mismatch at the −7 position and an asymmetrical bulge at the +11 position (2/1—target/guide), and (5) an asymmetrical bulge at the +6 position (1/0—target/guide). In some examples, the structural features of the guide-target RNA scaffold mimic the structural features of a Drosophila substrate in that the double stranded substrate comprises one or more (e.g., 1, 2, 3, 4, 5, 6 or 7) of the structural features also present in the Drosophila substrate. In some examples, the one or more structural features in the guide-target RNA scaffold share at least 70%, 80%, 85%, 90%, 95%, 98%, 99% or 100% sequence homology, length with one or more (e.g., 1, 2, 3, 4, 5, 6, or 7) structural features, or both of the naturally occurring Drosophila substrate. In some examples, the one or more structural features in the double stranded substrate share no sequence homology or less than 50% sequence homology with one or more structural features of the Drosophila substrate. In some examples, the one or more features in the double stranded substrate can be positioned (relative to each other) the same or similarly as the structural features of the natural ADAR substrate.

[0213] In some cases, a structural feature can be a structured motif. As disclosed herein, a “structured motif” comprises two or more structural features in a guide-target RNA scaffold. A structured motif can comprise any combination of structural features, such as described herein, to generate an ideal substrate for ADAR editing at a precise location(s). These structured motifs could be artificially engineered to maximized ADAR editing, can be modeled to recapitulate known ADAR substrates, or both.

### Targeting Domains

[0214] Engineered guide RNAs disclosed herein comprising a barbell macro-footprint sequence and at least some elements of a micro-footprint sequence can be engineered in any way suitable for RNA editing. In some examples, a micro-footprint sequence and a macro-footprint sequence as described herein can be included as part of a targeting sequence that allows the engineered guide RNA to hybridize to a region of a target RNA molecule. A targeting sequence can also be referred to as a “targeting domain” or a “targeting region”.

[0215] In some cases, a targeting sequence of an engineered guide RNA allows the engineered guide RNA to target an RNA sequence through base pairing, such as Watson Crick base pairing. In some examples, the targeting sequence can be located at either the N-terminus or C-terminus of the engineered guide RNA. In some cases, the targeting sequence can be located at both termini. The targeting sequence can be of any length. In some cases, the targeting sequence can be at least about: 1, 2, 3, 4, 5, 6, 7, 8, 9, 10, 11, 12, 13, 14, 15, 16, 17, 18, 19, 20, 21, 22, 23, 24, 25, 26, 27, 28, 29, 30, 31, 32, 33, 34, 35, 36, 37, 38, 39, 40, 41, 42, 43, 44, 45, 46, 47, 48, 49, 50, 51, 52, 53, 54, 55, 56, 57, 58, 59, 60, 61, 62, 63, 64, 65, 66, 67, 68, 69, 70, 71, 72, 73, 74, 75, 76, 77, 78, 79, 80, 81, 82, 83, 84, 85, 86, 87, 88, 89, 90, 91, 92, 93, 94, 95, 96, 97, 98, 99, 100, 101, 102, 103, 104, 105, 106, 107, 108, 109, 110, 111, 112, 113, 114, 115, 116, 117, 118, 119, 120, 121, 122, 123, 124, 125, 126, 127, 128, 129, 130, 131, 132, 133, 134, 135, 136, 137, 138, 139, 140, 141, 142, 143, 144, 145, 146, 147, 148, 149, 150, or up to about 200 nucleotides in length. In some cases, the targeting sequence can be no greater than about: 1, 2, 3, 4, 5, 6, 7, 8, 9, 10, 11, 12, 13, 14, 15, 16, 17, 18, 19, 20, 21, 22, 23, 24, 25, 26, 27, 28, 29, 30, 31, 32, 33, 34, 35, 36, 37, 38, 39, 40, 41, 42, 43, 44, 45, 46, 47, 48, 49, 50, 51, 52, 53, 54, 55, 56, 57, 58, 59, 60, 61, 62, 63, 64, 65, 66, 67, 68, 69, 70, 71, 72, 73, 74, 75, 76, 77, 78, 79, 80, 81, 82, 83, 84, 85, 86, 87, 88, 89, 90, 91, 92, 93, 94, 95, 96, 97, 98, 99, 100, 101, 102, 103, 104, 105, 106, 107, 108, 109, 110, 111, 112, 113, 114, 115, 116, 117, 118, 119, 120, 121, 122, 123, 124, 125, 126, 127, 128, 129, 130, 131, 132, 133, 134, 135, 136, 137, 138, 139, 140, 141, 142, 143, 144, 145, 146, 147, 148, 149, 150, or 200 nucleotides in length. In some examples, an engineered guide RNA comprises a targeting sequence that can be about 75-100, 80-110, 90-120, or 95-115 nucleotides in length. In some examples, an engineered guide comprises a targeting sequence that can be about 100 nucleotides in length.

[0216] In some examples, the target RNA sequence can be an mRNA molecule. In some examples, the mRNA molecule comprises a premature stop codon. In some examples, the mRNA comprises 1, 2, 3, 4 or 5 premature stop codons. In some examples, the stop codon can be an amber stop codon (UAG), an ochre stop codon (UAA), or an opal stop codon (UGA), or a combination thereof. In some examples, the premature stop codon can be a consequence of a point mutation. In some examples, the premature stop codon causes translation termination of an expression product expressed by the mRNA molecule. In some examples, the premature stop codon can be produced by a point mutation on an mRNA molecule in combination with two additional nucleotides. In some examples, the two additional nucleotides can be (i) a U and (ii) an A or a G, on a 5′ and a 3′ end of the point mutation.

[0217] In some examples, the target RNA sequence can be a pre-mRNA molecule. In some examples, the pre-mRNA molecule comprises a splice site mutation. In some examples, the splice site mutation facilitates unintended splicing of a pre-mRNA molecule. In some examples, the splice site mutation results in mistranslation, truncation, or both mistranslation and truncation of a protein encoded by the pre-mRNA molecule.

[0218] In some examples, the target RNA molecule can be a pre-mRNA or mRNA molecule encoded by an ABCA4, APP, SERPINA1, HEXA, LRRK2, SNCA, CFTR, APP, GBA, PINK1 or LIPA gene, a fragment of any of these, or any combination thereof. In some examples, the target RNA molecule encodes an ABCA4, APP, SERPINA1, HEXA, LRRK2, SNCA, CFTR, APP, GBA, PINK1, Tau, or LIPA protein, a fragment of any of these, or a combination thereof. In some examples, the DNA encoding the RNA molecule comprises a mutation relative to an otherwise identical reference DNA molecule. In some examples, the RNA molecule comprises a mutation relative to an otherwise identical reference RNA molecule. In some examples, the protein encoded for by the target RNA molecule comprises a mutation relative to an otherwise identical reference protein.

[0219] In some examples, the target RNA molecule can be encoded by, at least in part, an ABCA4 gene. In some examples, the ABCA4 gene comprises a mutation. In some examples, the mutation comprises a substitution of a G with an A at nucleotide position 5882 in an ABCA4 gene. In some examples, the mutation comprises a G with an A at nucleotide position 5714 in a ABCA4 gene. In some examples, the mutation comprises a substitution of a G with an A at nucleotide position 6320 in an ABCA4 gene. In some examples, the mutation causes or contributes to macular degeneration in a subject to which the engineered guide RNA is administered. In some examples, the macular degeneration can be Stargardt macular degeneration. In some examples the target RNA molecule comprises an adenosine with a 5′ G. In some examples, the adenosine with the 5′ G can be the base intended for chemical modification by the RNA editing entity. In some examples, the RNA editing entity can be an ADAR, and the ADAR chemically modifies the adenosine with the 5′ G after recruitment by the guide-target RNA scaffold. In some embodiments, an engineered guide RNA for targeting an ABCA4 mRNA can be any engineered guide depicted in FIG. 3, FIG. 4, FIG. 6, FIG. 7, FIG. 10, FIG. 11, FIG. 12, FIG. 13, FIG. 15, FIG. 16, or FIG. 18.

[0220] In some examples, the target RNA molecule can be encoded by, at least in part, a GAPDH gene. In some examples, the GAPDH gene comprises a mutation. In some examples, the mutation comprises a substitution of a G with an A at a nucleotide in a GAPDH gene. In some examples, the mutation causes or contributes to a neurological disease in a subject to which the engineered guide RNA is administered. In some examples, the neurological disease can be Alzheimer's disease. In some examples the target RNA molecule comprises an adenosine with a 5′ G. In some examples, the adenosine with the 5′ G can be the base intended for chemical modification by the RNA editing entity. In some examples, the RNA editing entity can be an ADAR, and the ADAR chemically modifies the adenosine with the 5′ G after recruitment by the double stranded substrate. In some embodiments, an engineered guide RNA for targeting a GAPDH mRNA can be any guide depicted in FIG. 21 or FIG. 22.

[0221] In some examples, the target RNA molecule can be encoded by, at least in part, an APP gene. In some examples, the APP gene comprises a mutation. In some examples, the mutation results in a mutation in an APP protein selected from the group consisting of: K670E, K670R, K670G, M671V, A673V, A673T, D672G, E682G, H684R, K687R, K687E, K687G, I712X, T714X, and any combination thereof. In some examples, the mutation causes or contributes to a neurological disease in a subject to which the engineered guide RNA is administered. In some examples, the neurological disease can be Alzheimer's disease, Parkinson's disease, corticobasal degeneration, dementia with Lewy bodies, Lewy body variant of Alzheimer's disease, Parkinson's disease with dementia, Pick's disease, progressive supranuclear palsy, dementia, fronto-temporal dementia with Parkinsonism linked to tau mutations on chromosome 17, or any combination thereof. In some examples the target RNA molecule comprises an adenosine with a 5′ G. In some examples, the adenosine with the 5′ G can be the base intended for chemical modification by the RNA editing entity. In some examples, the RNA editing entity can be an ADAR, and the ADAR chemically modifies the adenosine with the 5′ G after recruitment by the double stranded substrate. In some embodiments, an engineered guide RNA for targeting an APP mRNA can be any guide depicted in FIG. 28 or FIG. 29.

[0222] In some examples, the target RNA molecule can be encoded by, at least in part, a MAPT gene. In some examples, the MAPT gene comprises a mutation. In some examples, the mutation results in a mutation in a MAPT protein. In some examples, the mutation causes or contributes to a neurological disease in a subject to which the engineered guide RNA is administered. In some examples, the neurological disease can be Alzheimer's disease, Parkinson's disease, corticobasal degeneration, dementia with Lewy bodies, Lewy body variant of Alzheimer's disease, Parkinson's disease with dementia, Pick's disease, progressive supranuclear palsy, dementia, fronto-temporal dementia with Parkinsonism linked to tau mutations on chromosome 17, or any combination thereof. In some examples the target RNA molecule comprises an adenosine with a 5′ G. In some examples, the adenosine with the 5′ G can be the base intended for chemical modification by the RNA editing entity. In some examples, the RNA editing entity can be an ADAR, and the ADAR chemically modifies the adenosine with the 5′ G after recruitment by the double stranded substrate. In some embodiments, an engineered guide RNA for targeting a MAPT mRNA can be any guide depicted in FIG. 31 or FIG. 32.

[0223] In some cases, a targeting sequence comprises 95%, 96%, 97%, 98%, 99%, or 100% sequence complementarity to a target RNA. In some cases, a targeting sequence comprises less than 100% complementarity to a target RNA sequence. For example, a targeting sequence and a region of a target RNA that is bound by the targeting sequence can have a single base mismatch. In other cases, the targeting sequence of an engineered guide RNA comprises at least about 1, 2, 3, 4, 5, 6, 7, 8, 9, 10, 11, 12, 13, 14, 15, 16, 20, 30, 40 or up to about 50 base mismatches. In other cases, the targeting sequence of an engineered guide RNA comprises no more than about 1, 2, 3, 4, 5, 6, 7, 8, 9, 10, 11, 12, 13, 14, 15, 16, 20, 30, 40 or 50 base mismatches. In some examples, nucleotide mismatches are associated with structural features provided herein. In some examples, a targeting sequence comprises at least about 1, 2, 3, 4, 5, 6, 7, 8, 9, 10, 11, 12, 13, 14, or up to about 15 nucleotides that differ in complementarity from a wildtype RNA of a subject target RNA. In some examples, a targeting sequence comprises no more than about 1, 2, 3, 4, 5, 6, 7, 8, 9, 10, 11, 12, 13, 14, or 15 nucleotides that differ in complementarity from a wildtype RNA of a subject target RNA. In some cases, a targeting sequence comprises at least 50 nucleotides having complementarity to a target RNA. In some cases, a targeting sequence comprises from 50 to 150 nucleotides having complementarity to a target RNA. In some cases, a targeting sequence comprises from 50 to 200 nucleotides having complementarity to a target RNA. In some cases, a targeting sequence comprises from 50 to 250 nucleotides having complementarity to a target RNA. In some cases, a targeting sequence comprises from 50 to 300 nucleotides having complementarity to a target RNA. In some cases, a targeting sequence comprises 50, 51, 52, 53, 54, 55, 56, 57, 58, 59, 60, 61, 62, 63, 64, 65, 66, 67, 68, 69, 70, 71, 72, 73, 74, 75, 76, 77, 78, 79, 80, 81, 82, 83, 84, 85, 86, 87, 88, 89, 90, 91, 92, 93, 94, 95, 96, 97, 98, 99, 100, 101, 102, 103, 104, 105, 106, 107, 108, 109, 110, 111, 112, 113, 114, 115, 116, 117, 118, 119, 120, 121, 122, 123, 124, 125, 126, 127, 128, 129, 130, 131, 132, 133, 134, 135, 136, 137, 138, 139, 140, 141, 142, 143, 144, 145, 146, 147, 148, 149, 150, 151, 152, 153, 154, 155, 156, 157, 158, 159, 160, 161, 162, 163, 164, 165, 166, 167, 168, 169, 170, 171, 172, 173, 174, 175, 176, 177, 178, 179, 180, 190, 191, 192, 193, 194, 195, 196, 197, 198, 199, 200, 201, 202, 203, 204, 205, 206, 207, 208, 209, 210, 211, 212, 213, 214, 215, 216, 217, 218, 219, 220, 221, 222, 223, 224, 225, 226, 227, 228, 229, 230, 231, 232, 233, 234, 235, 236, 237, 238, 239, 240, 241, 242, 243, 244, 245, 246, 250, 251, 252, 253, 254, 255, 256, 257, 258, 259, 260, 261, 262, 263, 264, 265, 266, 267, 268, 269, 270, 271, 272, 273, 274, 275, 276, 277, 278, 279, 280, 281, 282, 283, 284, 285, 286, 287, 288, 289, 290, 291, 292, 293, 294, 295, 296, 297, 298, 299, or 300 nucleotides having complementarity to a target RNA. In some cases, a targeting sequence comprises more than 50 nucleotides total and has at least 50 nucleotides having complementarity to a target RNA. In some cases, a targeting sequence comprises from 50 to 400 nucleotides total and has from 50 to 150 nucleotides having complementarity to a target RNA. In some cases, a targeting sequence comprises from 50 to 400 nucleotides total and has from 50 to 200 nucleotides having complementarity to a target RNA. In some cases, a targeting sequence comprises from 50 to 400 nucleotides total and has from 50 to 250 nucleotides having complementarity to a target RNA. In some cases, a targeting sequence comprises from 50 to 400 nucleotides total and has from 50 to 300 nucleotides having complementarity to a target RNA. In some cases, the at least 50 nucleotides having complementarity to a target RNA are separated by a structural feature described herein (e.g., one or more mismatches, one or more bulges, or one or more loops, one or more hairpins, or any combination thereof). In some cases, the 50 to 150 nucleotides having complementarity to a target RNA are separated by a structural feature described herein (e.g., one or more mismatches, one or more bulges, or one or more loops, one or more hairpins, or any combination thereof). In some cases, the 50 to 200 nucleotides having complementarity to a target RNA are separated by a structural feature described herein (e.g., one or more mismatches, one or more bulges, or one or more loops, one or more hairpins, or any combination thereof). In some cases, the 50 to 250 nucleotides having complementarity to a target RNA are separated by a structural feature described herein (e.g., one or more mismatches, one or more bulges, or one or more loops, one or more hairpins, or any combination thereof). In some cases, the 50 to 300 nucleotides having complementarity to a target RNA are separated by a structural feature described herein (e.g., one or more mismatches, one or more bulges, or one or more loops, one or more hairpins, or any combination thereof). For example, a targeting sequence can comprise a total of 54 nucleotides wherein, sequentially, 25 nucleotides are complementarity to a target RNA, 4 nucleotides form a bulge, and 25 nucleotides are complementarity to a target RNA. As another example, a targeting sequence comprises a total of 118 nucleotides wherein, sequentially, 25 nucleotides are complementarity to a target RNA, 4 nucleotides form a bulge, 25 nucleotides are complementarity to a target RNA, 14 nucleotides form an internal loop, and 50 nucleotides are complementary to a target RNA.

[0224] In some cases, an engineered guide RNA can comprise multiple targeting sequences. In some instances, one or more target sequence domains in the engineered guide RNA can bind to one or more regions of a target RNA. For example, a first targeting sequence can be configured to be at least partially complementary to a first region of a target RNA (e.g., a first exon of a pre-mRNA), while a second targeting sequence can be configured to be at least partially complementary to a second region of a target RNA (e.g., a second exon of a pre-mRNA). In some instances, multiple target sequences can be operatively linked to provide continuous hybridization of multiple regions of a target RNA. In some instances, multiple target sequences can provide non-continuous hybridization of multiple regions of a target RNA. A “non-continuous” overlap or hybridization refers to hybridization of a first region of a target RNA by a first targeting sequence, along with hybridization of a second region of a target RNA by a second targeting sequence, where the first region and the second region of the target RNA are discontinuous (e.g., where there is intervening sequence between the first and the second region of the target RNA). For example, a targeting sequence can be configured to bind to a portion of a first exon and can comprise an internal asymmetric loop (e.g., an oligo tether) that is configured to bind to a portion of a second exon, while the intervening sequence between the portion of exon 1 and the portion of exon 2 is not hybridized by either the targeting sequence or the oligo tether. Use of an engineered guide RNA as described herein configured for non-continuous hybridization can provide a number of benefits. For instance, such a guide can potentially target pre-mRNA during transcription (or shortly thereafter), which can then facilitate chemical modification using a deaminase (e.g., ADAR) co-transcriptionally and thus increase the overall efficiency of the chemical modification. Further, the use of oligo tethers to provide non-continuous hybridization while skipping intervening sequence can result in shorter, more specific guide RNA with fewer off-target editing.

[0225] In some instances, an engineered guide RNA configured for non-continuous hybridization to a target RNA (e.g., an engineered guide RNA comprising a targeting sequence with an oligo tether) can be configured to bind distinct regions or a target RNA separated by intervening sequence. In some instances, the intervening sequence can be at least: 1, 2, 3, 4, 5, 6, 7, 8, 9, 10, 11, 12, 13, 14, 15, 16, 17, 18, 19, 20, 21, 22, 23, 24, 25, 26, 27, 28, 29, 30, 31, 32, 33, 34, 35, 36, 37, 38, 39, 40, 41, 42, 43, 44, 45, 46, 47, 48, 49, 50, 51, 52, 53, 54, 55, 56, 57, 58, 59, 60, 61, 62, 63, 64, 65, 66, 67, 68, 69, 70, 71, 72, 73, 74, 75, 76, 77, 78, 79, 80, 81, 82, 83, 84, 85, 86, 87, 88, 89, 90, 91, 92, 93, 94, 95, 96, 97, 98, 99, 100, 110, 120, 130, 140, 150, 160, 170, 180, 190, 200, 210, 220, 230, 240, 250, 260, 270, 280, 290, 300, 310, 320, 330, 340, 350, 360, 370, 380, 390, 400, 410, 420, 430, 440, 450, 460, 470, 480, 490, 500, 510, 520, 530, 540, 550, 560, 570, 580, 590, 600, 610, 620, 630, 640, 650, 660, 670, 680, 690, 700, 710, 720, 730, 740, 750, 760, 770, 780, 790, 800, 810, 820, 830, 840, 850, 860, 870, 880, 890, 900, 910, 920, 930, 940, 950, 960, 970, 980, 990, 1000, 1100, 1200, 1300, 1400, 1500, 1600, 1700, 1800, 1900, 2000, 2100, 2200, 2300, 2400, 2500, 2600, 2700, 2800, 2900, 3000, 3100, 3200, 3300, 3400, 3500, 3600, 3700, 3800, 3900, 4000, 4100, 4200, 4300, 4400, 4500, 4600, 4700, 4800, 4900, 5000, 5100, 5200, 5300, 5400, 5500, 5600, 5700, 5800, 5900, 6000, 6100, 6200, 6300, 6400, 6500, 6600, 6700, 6800, 6900, 7000, 7100, 7200, 7300, 7400, 7500, 7600, 7700, 7800, 7900, 8000, 8100, 8200, 8300, 8400, 8500, 8600, 8700, 8800, 8900, 9000, 9100, 9200, 9300, 9400, 9500, 9600, 9700, 9800, 9900, or 10000 bases. In some instances, the targeting sequence and oligo tether can target distinct non-continuous regions of the same intron or exon. In some instances, the targeting sequence and oligo tether can target distinct non-continuous regions of adjacent exons or introns. In some instances, the targeting sequence and oligo tether can target distinct non-continuous regions of distal exons or introns.

### Circularized Guide RNA

[0226] In some instances, an engineered guide RNA can be circularized. A circularized engineered guide RNA can be produced from a precursor engineered polynucleotide. In some cases, a precursor engineered polynucleotide can be a precursor engineered linear polynucleotide. In some cases, a precursor engineered polynucleotide can be linear. For example, a precursor engineered polynucleotide can be a linear mRNA transcribed from a plasmid. In another example, a precursor engineered polynucleotide can be constructed to be a linear polynucleotide with domains such as a ribozyme domain and a ligation domain that allow for circularization in a cell. The linear polynucleotide with the ligation and ribozyme domains can be transfected into a cell where it can circularize via endogenous cellular enzymes. In some cases, a precursor engineered polynucleotide can be circular. In some cases, a precursor engineered polynucleotide can comprise DNA, RNA or both. In some cases, a precursor engineered polynucleotide can comprise a precursor engineered guide RNA. In some cases, a precursor engineered guide RNA can be used to produce an engineered guide RNA.

[0227] A circular or looped engineered guide polynucleotide, such as an engineered guide RNA can be formed directly or indirectly by forming a linkage (such as a covalent linkage) between more than one end of a RNA sequence, such as a 5′ end and a 3′ end. An RNA sequence can comprise an engineered guide RNA (such as a recruiting domain, targeting domain, or both). A linkage can be formed by employing an enzyme, such as a ligase. A suitable ligase (or synthetase) can include a ligase that forms a covalent bond. A covalent bond can include a carbon-oxygen bond, a carbon-sulfur bond, a carbon-nitrogen bond, a carbon-carbon bond, a phosphoric ester bond, or any combination thereof. A linkage can also be formed by employing a recombinase. An enzyme can be recruited to an RNA sequence to form a linkage. A circular or looped RNA can be formed by ligating more than one end of an RNA sequence using a linkage element. In some embodiments, a linkage can be formed by a ligation reaction. In some instances, a linkage can be formed by a homologous recombination reaction. A linkage element can employ click chemistry to form a circular or looped RNA. A linkage element can be an azide-based linkage. A circular or looped RNA can be formed by genetically encoding or chemically synthesizing the circular or looped RNA.

[0228] A circular or looped RNA can be formed by employing a self-cleaving entity, such as a ribozyme, tRNA, aptamer, catalytically active fragment of any of these, or any combination thereof. For example, a ribozyme, a tRNA, an aptamer, a catalytically active fragment of any of these, or any combination thereof can be added to a 3′ end, a 5′ end, or both of a precursor engineered RNA. In another example, a ribozyme, a tRNA, an aptamer, a catalytically active fragment of any of these, or any combination thereof can be added to a 3′ terminal end, a 5′ terminal end, or both of a precursor engineered RNA. A self-cleaving ribozyme can comprise, for example, an RNase P RNA a Hammerhead ribozyme (e.g. a Schistosoma mansoni ribozyme), a glmS ribozyme, an HDV-like ribozyme, an R2 element, a peptidyl transferase 23S rRNA, a GIR1 branching ribozyme, a leadzyme, a group II intron, a hairpin ribozyme, a VS ribozyme, a CPEB3 ribozyme, a CoTC ribozyme, or a group I intron. In some cases, the self-cleaving ribozyme can be a trans-acting ribozyme that joins one RNA end on which it is present to a separate RNA end. In some embodiments, an aptamer can be added to each end of the engineered guide RNA. A ligase can be contacted with the aptamers at each end of the engineered guide RNA to form a covalent linkage between the aptamers thereby forming a circular engineered guide RNA. In some cases, a self-cleaving element or an aptamer can be configured to facilitate self-circularization of an engineered polynucleotide or a pro-polynucleotide (e.g. from a precursor engineered polypeptide) after transcription in a cell. In some instances, circularization of a guide RNA can be shown by PCR. For example, primers can by developed that bind to the end of a guide RNA and are directed outward such that a product is only formed when guides are circularized.

[0229] In some cases, circularization can occur by back-slicing and ligation of an exon. For example, an RNA can be engineered from 5′ to 3′ to comprise a forward complementary sequence intron, an exon (which can comprise the guide sequence), followed by a reverse complementary sequence intron. Once transcribed, the complementary sequence introns can hybridize and form dsRNA. The internal exon containing the guide sequence can be removed by splicing and ligated by an endogenous ligase to form a circular guide. In one example, an engineered guide RNA can initiate circularization in a cell by autocatalytic reactions of encoded ribozymes. After cleavage by one or more ribozymes, the linear polynucleotide will undergo intracellular RNA ligation of the 5′ and the 3′ end of ligation sequences by an endogenous ligase to circularize the guide RNA.

[0230] A suitable self-cleaving molecule can include a ribozyme. For example, a ribozyme domain can create an autocatalytic RNA. A ribozyme can comprise an RNase P, an rRNA (such as a Peptidyl transferase 23S rRNA), Leadzyme, Group I intron ribozyme, Group II intron ribozyme, a GIR1 branching ribozyme, a glmS ribozyme, a hairpin ribozyme, a Hammerhead ribozyme, an HDV ribozyme, a Twister ribozyme, a Twister sister ribozyme, a VS ribozyme, a Pistol ribozyme, a Hatchet ribozyme, a viroid, or any combination thereof. A ribozyme can include a P3 twister U2A ribozyme. A ribozyme can comprise 5′ GCCATCAGTCGCCGGTCCCAAGCCCGGATAAAATGGGAGGGGGCGGGAAACCGCCT 3′ (SEQ ID NO: 3125). A ribozyme can comprise 5′ GCCAUCAGUCGCCGGUCCCAAGCCCGGAUAAAAUGGGAGGGGGCGGGAAACCGCC U 3′ (SEQ ID NO: 3126). A ribozyme can comprise at least about: 70%, 75%, 80%, 85%, 90%, 95%, or 100% sequence homology to 5′ GCCATCAGTCGCCGGTCCCAAGCCCGGATAAAATGGGAGGGGGCGGGAAACCGCCT 3′ (SEQ ID NO: 3125). A ribozyme can comprise at least about: 70%, 75%, 80%, 85%, 90%, 95%, or 100% sequence homology to 5′ GCCAUCAGUCGCCGGUCCCAAGCCCGGAUAAAAUGGGAGGGGGCGGGAAACCGCC U 3′ (SEQ ID NO: 3126). A ribozyme can include a P1 Twister Ribozyme. A ribozyme can include 5′ AACACTGCCAATGCCGGTCCCAAGCCCGGATAAAAGTGGAGGGTACAGTCCACGC 3′ (SEQ ID NO: 3127). A ribozyme can include 5′ AACACUGCCAAUGCCGGUCCCAAGCCCGGAUAAAAGUGGAGGGUACAGUCCACGC 3′ (SEQ ID NO: 3128). A ribozyme can comprise at least about: 70%, 75%, 80%, 85%, 90%, 95%, or 100% sequence homology to 5′ AACACTGCCAATGCCGGTCCCAAGCCCGGATAAAAGTGGAGGGTACAGTCCACGC 3′ (SEQ ID NO: 3127). A ribozyme can comprise at least about: 70%, 75%, 80%, 85%, 90%, 95%, or 100% sequence homology to 5′ AACACUGCCAAUGCCGGUCCCAAGCCCGGAUAAAAGUGGAGGGUACAGUCCACGC 3′ (SEQ ID NO: 3128).

[0231] A ligation domain can facilitate a linkage, covalent or non-covalent, of a first nucleotide to a second nucleotide. In some embodiments, a ligation domain can recruit a ligating entity to facilitate a ligation reaction. In some cases, a ligation domain can recruit a recombining entity to facilitate a homologous recombination. In some instances, a first ligation domain can facilitate a linkage, covalent or non-covalent, to a second ligation domain. In some embodiments, a first ligation domain can facilitate the complementary pairing of a second ligation domain. In some cases, a ligation domain can comprise 5′ AACCATGCCGACTGATGGCAG 3′ (SEQ ID NO: 3129). In some embodiments, a ligation domain can comprise 5′ GATGTCAGGTGCGGCTGACTACCGTC 3′ (SEQ ID NO: 3130). In some cases, a ligation domain can comprise 5′ AACCAUGCCGACUGAUGGCAG 3′ (SEQ ID NO: 3131). In some cases, a ligation domain can comprise 5′ GAUGUCAGGUGCGGCUGACUACCGUC 3′ (SEQ ID NO: 3132). In some cases, a ligation domain can comprise at least about: 70%, 75%, 80%, 85%, 90%, 95%, or 100% sequence homology to 5′AACCATGCCGACTGATGGCAG 3′ (SEQ ID NO: 3129). In some cases, a ligation domain can comprise at least about: 70%, 75%, 80%, 85%, 90%, 95%, or 100% sequence homology to 5′ GATGTCAGGTGCGGCTGACTACCGTC 3′ (SEQ ID NO: 3130). In some cases, a ligation domain can comprise at least about: 70%, 75%, 80%, 85%, 90%, 95%, or 100% sequence homology to 5′ AACCAUGCCGACUGAUGGCAG 3′ (SEQ ID NO: 3131). In some cases, a ligation domain can comprise at least about: 70%, 75%, 80%, 85%, 90%, 95%, or 100% sequence homology to 5′ GAUGUCAGGUGCGGCUGACUACCGUC 3′ (SEQ ID NO: 3132).

### Bolt-on Recruiting Domains

[0232] In some embodiments, an engineered guide RNA having a barbell macro-footprint sequence can further comprise an RNA editing entity recruiting domain configured to be formed and present in the absence of hybridization to a target RNA.

[0233] A “recruiting domain” can be referred to herein interchangeably as a “recruiting sequence” or a “recruiting region.” In some examples, an engineered guide RNA can be configured to facilitate editing of a base of a nucleotide of a polynucleotide of a region of a target RNA, modulation expression of a polypeptide encoded by the target RNA, or both. In some cases, an engineered guide RNA can be configured to facilitate an editing of a base of a nucleotide or polynucleotide of a region of an RNA by an RNA editing entity. In order to facilitate editing, an engineered guide RNA of the disclosure can be configured to recruit an RNA editing entity. Some embodiments provide for an RNA editing entity comprising an ADAR protein, where the ADAR protein can be selected from the group consisting of an ADAR1 (e.g., human or mouse), an ADAR2 (e.g., human or mouse), and any combination thereof. Various RNA editing entity recruiting domains can be utilized. In some examples, a recruiting domain comprises: Glutamate ionotropic receptor AMPA type subunit 2 (GluR2) or Alu. In some embodiments of the disclosure, the RNA editing entity can have an ADAR protein. An ADAR protein can be selected from the group consisting of: an ADAR1, an ADAR2, and a combination of ADAR1 and ADAR2. Other embodiments can be directed to an RNA editing entity selected from the group consisting of: a human ADAR1, a mouse ADAR1, a human ADAR2, a mouse ADAR2, and any combination thereof.

[0234] In some examples, more than one recruiting domain can be included in an engineered guide RNA of the disclosure. In examples where a recruiting domain can be present, the recruiting domain can be utilized to position the RNA editing entity to effectively react with a target RNA after the targeting sequence, for example an antisense sequence, hybridizes to a target RNA. In some cases, a recruiting domain can allow for transient binding of the RNA editing entity to the engineered guide RNA. In some examples, the recruiting domain allows for permanent binding of the RNA editing entity to the engineered guide RNA. A recruiting domain can be of any length. In some cases, a recruiting domain can be from about 1, 2, 3, 4, 5, 6, 7, 8, 9, 10, 11, 12, 13, 14, 15, 16, 17, 18, 19, 20, 21, 22, 23, 24, 25, 26, 27, 28, 29, 30, 31, 32, 33, 34, 35, 36, 37, 38, 39, 40, 41, 42, 43, 44, 45, 46, 47, 48, 49, 50, 51, 52, 53, 54, 55, 56, 57, 58, 59, 60, 61, 62, 63, 64, 65, 66, 67, 68, 69, 70, 71, 72, 73, 74, 75, up to about 80 nucleotides in length. In some cases, a recruiting domain can be no more than about 1, 2, 3, 4, 5, 6, 7, 8, 9, 10, 11, 12, 13, 14, 15, 16, 17, 18, 19, 20, 21, 22, 23, 24, 25, 26, 27, 28, 29, 30, 31, 32, 33, 34, 35, 36, 37, 38, 39, 40, 41, 42, 43, 44, 45, 46, 47, 48, 49, 50, 51, 52, 53, 54, 55, 56, 57, 58, 59, 60, 61, 62, 63, 64, 65, 66, 67, 68, 69, 70, 71, 72, 73, 74, 75, or 80 nucleotides in length. In some cases, a recruiting domain can be about 45 nucleotides in length. In some cases, at least a portion of a recruiting domain comprises at least 1 to about 75 nucleotides. In some cases, at least a portion of a recruiting domain comprises about 45 nucleotides to about 60 nucleotides.

[0235] In some embodiments, a recruiting domain comprises a GluR2 sequence or functional fragment thereof. In some cases, a GluR2 sequence can be recognized by an RNA editing entity, such as an ADAR or biologically active fragment thereof. In some embodiments, a GluR2 sequence can be a non-naturally occurring sequence. In some cases, a GluR2 sequence can be modified, for example for enhanced recruitment. In some embodiments, a GluR2 sequence can comprise a portion of a naturally occurring GluR2 sequence and a synthetic sequence.

[0236] In some examples, a recruiting domain comprises a GluR2 sequence, or a sequence having at least about 70%, 80%, 85%, 90%, 95%, 98%, 99%, or 100% identity, length, or both to: GUGGAAUAGUAUAACAAUAUGCUAAAUGUUGUUAUAGUAUCCCAC (SEQ ID NO:1). In some cases, a recruiting domain can comprise at least about 80% sequence homology to at least about 10, 15, 20, 25, or 30 nucleotides of SEQ ID NO:1. In some examples, a recruiting domain can comprise at least about 90%, 95%, 96%, 97%, 98%, or 99% sequence homology, length, or both to SEQ ID NO:1.

[0237] Any number of recruiting domains can be found in an engineered RNA of the present disclosure. In some examples, at least about 1, 2, 3, 4, 5, 6, 7, 8, 9, or up to about 10 recruiting domains can be included in an engineered RNA. Recruiting domains can be located at any position of an engineered guide RNA. In some cases, a recruiting domain can be on an N-terminus, middle, or C-terminus of a polynucleotide. A recruiting domain can be upstream or downstream of a targeting sequence. In some cases, a recruiting domain flanks a targeting sequence of a guide. A recruiting sequence can comprise all ribonucleotides or deoxyribonucleotides, although a recruiting domain comprising both ribo- and deoxy-ribonucleotides can in some cases not be excluded.

### Multiplexed Therapy

[0238] In some cases, the present disclosure encompasses multiplexed therapy, including multiplexed editing of multiple target RNAs, editing of multiple target sites within a target RNA (e.g., for missense mutation correction and functional protein restoration), editing of RNA and knockdown, or any combination thereof. In some cases, use of vectors that contains multiple targeting guide RNAs can allow for simultaneous targeting of multiple gene targets or multiple sites within the same gene target. Any combination of gene targets disclosed herein can be targeted using a multiplexed approach to treat a particular genetic disease. As the compositions can be applied to gene expression knockdown, they could also include a combination of start-site editing to reduce expression, steric hinderance because the guide could block ribosomal activity, increased degradation of the targeted mRNA, or any combination thereof. The compositions and methods disclosed herein, thus, may suppress expression in an ADAR-dependent and ADAR-independent manner.

[0239] In some embodiments, a multiplex approach can be used to target Abeta, Tau, or SNCA target RNAs. Both Abeta and Tau or SNCA are implicated in Alzheimer's disease initiation/progression. The compositions and methods disclosed herein can target both and, thus, may involve a multiplexed targeting approach. A multiplexed targeting approach can target 2, 3, 4, 5, 6, or more proteinopathies by independent mechanisms of action. For example, mRNA base editing using the engineered guide RNAs of the present disclosure can edit one or more cleavage sites of an APP protein preventing or substantially reducing Abeta fragment formation and mRNA base editing using the engineered guide RNAs of the present disclosure can knockdown Tau protein formation. In some cases, mRNA base editing using the guide RNAs of the present disclosure can edit one or more cleavage sites of an APP protein preventing or substantially reducing Abeta fragment formation and an additional therapeutic agent (e.g., an additional RNA polynucleotide, such as a siRNA, a shRNA, a miRNA, a piRNA, or an antisense oligonucleotide), which can knockdown Tau protein formation.

[0240] In some embodiments, a vector of the present disclosure may be a multiplex vector that contain multiple engineered guide polynucleotides targeting multiple target RNAs. In other cases, different engineered guide polynucleotide targeting different target RNAs can be maintained on different vectors. Vectors encoding for compositions that can (a) facilitate an edit to a target RNA (e.g., a cleavage site of a protein target, such as is the case in targeting the beta secretase cleavage site in APP, to a TIS or UTR region for protein knockdown, to a missense mutation to restore the wild-type sequence and thus restore protein expression, or other targeting strategies described herein), (c) reduce or regulate the activity of a protein target produced, (d) correct a mutation and thereby restore functional protein expression, or (e) any combination thereof. A vector or a multiplex vector or vectors can be formulated in unit dose form. A multiplex vector can be configured to modulate more than one protein target implicated in a neurodegenerative disease. A vector can reduce an amount of the protein target by (i) performing an edit to a sequence that encodes for the protein, (ii) performing an edit to a sequence that does not encode for the protein, (iii) sterically hindering a promoter region associated with the protein target, or (iv) any combination thereof.

[0241] In some cases, polynucleotide base editing can be used in conjunction with an additional method of knocking down gene expression of either the same gene targeted by the polynucleotide base editing or an additional gene implicated in a disease, such as a neurodegenerative disease. For example, mRNA base editing (e.g. using the engineered guide RNAs disclosed herein) can be used in conjunction with an RNA polynucleotide that associates with an mRNA sequence to minimize expression of a targeted gene. Examples of such RNA polynucleotides capable of minimizing expression of a targeted gene include small interfering RNA (siRNA), short hairpin RNA (shRNA), microRNA (miRNA), piwi-interacting RNA (piRNA), or an anti-sense oligonucleotide (ASO). In some cases, the ASO comprises a variant oligonucleotide structure that stabilizes the oligonucleotide and/or minimizes nuclease activity on the nucleotide. Examples of such variants oligonucleotides include morpholino oligomers. Thus, the present disclosure provides for compositions of engineered guides RNAs in combination with one or more additional therapeutic agents selected from small interfering RNA (siRNA), short hairpin RNA (shRNA), microRNA (miRNA), piwi-interacting RNA (piRNA), and an antisense oligonucleotide (ASO).

[0242] An mRNA base editing approach using an engineered polynucleotide, such as guide RNA, of the present disclosure can be combined with an antibody-based approach (such as anti-Abeta antibodies). Disadvantages to employing an antibody-based approach alone can include low/inefficient transfer across the blood-brain-barrier and development of ARIA (neuroinflammation) in patients treated with these therapies constrain the therapeutic dose. It is likely that more than one Abeta species (including soluble Abeta) contribute to disease progression. Thus, multiple different antibodies to the different species can be needed. Antibodies that may be combined with the engineered guide RNAs disclosed herein for combination treatment of a subject in need thereof can include bapineuzumab, solanezumab, gantenerumab, crenezumab, ponezumab, aducanumab, BAN2401, or any combination thereof.

[0243] An mRNA base editing approach using the engineered polynucleotides of the present disclosure can be combined with a secretase inhibitor approach (such as a beta secretase and γ-secretase inhibitors). Both enzymes appear to have proteolytic activity necessary for maintenance of synaptic function/neuronal health and thus severely or completely reducing function can led to poor long-term outcomes. Utilizing a combined approach of an mRNA base editing and secretase inhibitor approach can permit reducing dosing of the secretase inhibitor as compared to a solitary approach of delivering the secretase inhibitor alone. Inhibitors that may be combined with the engineered guide RNAs disclosed herein for combination treatment of a subject in need thereof can include verubecestat, atabecestat, lanabecestat, elenbecestat, umibecestat, avagacestat, semagacestat, or any combination thereof.

### Pharmaceutical Compositions

[0244] An engineered guide RNA described herein (e.g., a guide RNA comprising abarbell macro-footprint sequence and at least some elements of a micro-footprint sequence) or a polynucleotide encoding the same can be formulated with a pharmaceutically acceptable carrier for administration to a subject (e.g., a human or a non-human animal).

[0245] The compositions described herein (e.g., compositions comprising an engineered guide RNA or polynucleotide encoding an engineered guide RNA of the disclosure) can be formulated with a pharmaceutically acceptable carrier, diluent, or excipient for administration to a subject (e.g., a human or a non-human animal). A pharmaceutically acceptable carrier can include, but is not limited to, phosphate buffered saline solution, water, emulsions (e.g., an oil/water emulsion or a water/oil emulsions), glycerol, liquid polyethylene glycols, aprotic solvents such (e.g., dimethylsulfoxide, N-methylpyrrolidone, or mixtures thereof), and various types of wetting agents, solubilizing agents, anti-oxidants, bulking agents, protein carriers such as albumins, any and all solvents, dispersion media, coatings, sodium lauryl sulfate, isotonic and absorption delaying agents, disintegrants (e.g., potato starch or sodium starch glycolate), and the like. The compositions also can include stabilizers and preservatives. Additional examples of carriers, diluents, excipients, stabilizers, and adjuvants consistent with the compositions of the present disclosure can be found in, for example, Remington's Pharmaceutical Sciences, 21st Ed., Mack Publ. Co., Easton, Pa. (2005), incorporated herein by reference in its entirety.

### Chemical Modification

[0246] An engineered guide RNA as described herein for use in treating a disease or condition in a subject comprises at least one chemical modification. In some embodiments, the engineered guide RNA comprises at least one, two, three, four, five, six, seven, eight, nine, ten, 11, 12, 13, 14, 15, 16, 17, 18, 19, 20, 30, 50, 100, or more chemical modifications. In some cases, the engineered guide RNAs disclosed herein with barbell macro-footprints can be manufactured, chemically modified, and delivered directly to a subject in need thereof as RNA (without a vector, such as an AAV).

[0247] Exemplary chemical modifications comprise any one of: 5′ adenylate, 5′ guanosine-triphosphate cap, 5′ N7-Methylguanosine-triphosphate cap, 5′ triphosphate cap, 3′ phosphate, 3′thiophosphate, 5′phosphate, 5′thiophosphate, Cis-Syn thymidine dimer, trimers, C12 spacer, C3 spacer, C6 spacer, dSpacer, PC spacer, rSpacer, Spacer 18, Spacer 9,3′-3′ modifications, 5′-5′ modifications, abasic, acridine, azobenzene, biotin, biotin BB, biotin TEG, cholesteryl TEG, desthiobiotin TEG, DNP TEG, DNP-X, DOTA, dT-Biotin, dual biotin, PC biotin, psoralen C2, psoralen C6, TINA, 3′DABCYL, black hole quencher 1, black hole quencher 2, DABCYL SE, dT-DABCYL, IRDye QC-1, QSY-21, QSY-35, QSY-7, QSY-9, carboxyl linker, thiol linkers, 2′deoxyribonucleoside analog purine, 2′deoxyribonucleoside analog pyrimidine, ribonucleoside analog, 2′-O-methyl ribonucleoside analog, sugar modified analogs, wobble/universal bases, fluorescent dye label, 2′fluoro RNA, 2′O-methyl RNA, methylphosphonate, phosphodiester DNA, phosphodiester RNA, phosphothioate DNA, phosphorothioate RNA, UNA, pseudouridine-5′-triphosphate, 5-methylcytidine-5′-triphosphate, 2-O-methyl 3phosphorothioate or any combinations thereof.

[0248] A chemical modification can be made at any location of the engineered guide RNA. In some cases, a modification may be located in a 5′ or 3′ end. In some cases, a polynucleotide comprises a modification at a base selected from: 1, 2, 3, 4, 5, 6, 7, 8, 9, 10, 11, 12, 13, 14, 15, 16, 17, 18, 19, 20, 21, 22, 23, 24, 25, 26, 27, 28, 29, 30, 31, 32, 33, 34, 35, 36, 37, 38, 39, 40, 41, 42, 43, 44, 45, 46, 47, 48, 49, 50, 51, 52, 53, 54, 55, 56, 57, 58, 59, 60, 61, 62, 63, 64, 65, 66, 67, 68, 69, 70, 71, 72, 73, 74, 75, 76, 77, 78, 79, 80, 81, 82, 83, 84, 85, 86, 87, 88, 89, 90, 91, 92, 93, 94, 95, 96, 97, 98, 99, 100, 101, 102, 103, 104, 105, 106, 107, 108, 109, 110, 111, 112, 113, 114, 115, 116, 117, 118, 119, 120, 121, 122, 123, 124, 125, 126, 127, 128, 129, 130, 131, 132, 133, 134, 135, 136, 137, 138, 139, 140, 141, 142, 143, 144, 145, 146, 147, 148, 149, or 150. More than one modification can be made to the engineered guide RNA. In some cases, a modification can be permanent. In other cases, a modification can be transient. In some cases, multiple modifications may be made to the engineered guide RNA. the engineered guide RNA modification can alter physio-chemical properties of a nucleotide, such as their conformation, polarity, hydrophobicity, chemical reactivity, base-pairing interactions, or any combination thereof.

[0249] A chemical modification can also be a phosphorothioate substitute. In some cases, a natural phosphodiester bond can be susceptible to rapid degradation by cellular nucleases and; a modification of internucleotide linkage using phosphorothioate (PS) bond substitutes can be more stable towards hydrolysis by cellular degradation. A modification can increase stability in a polynucleic acid. A modification can also enhance biological activity. In some cases, a phosphorothioate enhanced RNA polynucleic acid can inhibit RNase A, RNase T1, calf serum nucleases, or any combinations thereof. These properties can allow the use of PS-RNA polynucleic acids to be used in applications where exposure to nucleases may be of high probability in vivo or in vitro. For example, phosphorothioate (PS) bonds can be introduced between the last 3-5 nucleotides at the 5′- or 3′-end of a polynucleic acid which can inhibit exonuclease degradation. In some cases, phosphorothioate bonds can be added throughout an entire polynucleic acid to reduce attack by endonucleases.

[0250] In some embodiments, chemical modification can occur at 3′OH, group, 5′OH group, at the backbone, at the sugar component, or at the nucleotide base. Chemical modification can include non-naturally occurring linker molecules of interstrand or intrastrand cross links. In one aspect, the chemically modified nucleic acid comprises modification of one or more of the 3′OH or 5′OH group, the backbone, the sugar component, or the nucleotide base, or addition of non-naturally occurring linker molecules. In some embodiments, chemically modified backbone comprises a backbone other than a phosphodiester backbone. In some embodiments, a modified sugar comprises a sugar other than deoxyribose (in modified DNA) or other than ribose (modified RNA). In some embodiments, a modified base comprises a base other than adenine, guanine, cytosine, thymine or uracil. In some embodiments, the engineered guide RNA comprises at least one chemically modified base. In some instances, the engineered guide RNA comprises 2, 3, 4, 5, 6, 7, 8, 9, 10, 15, 20, or more modified bases. In some cases, chemical modifications to the base moiety include natural and synthetic modifications of adenine, guanine, cytosine, thymine, or uracil, and purine or pyrimidine bases.

[0251] In some embodiments, the at least one chemical modification of the engineered guide RNA comprises a modification of any one of or any combination of: modification of one or both of the non-linking phosphate oxygens in the phosphodiester backbone linkage; modification of one or more of the linking phosphate oxygens in the phosphodiester backbone linkage; modification of a constituent of the ribose sugar; replacement of the phosphate moiety with “dephospho” linkers; modification or replacement of a naturally occurring nucleobase; modification of the ribose-phosphate backbone; modification of 5′ end of polynucleotide; modification of 3′ end of polynucleotide; modification of the deoxyribose phosphate backbone; substitution of the phosphate group; modification of the ribophosphate backbone; modifications to the sugar of a nucleotide; modifications to the base of a nucleotide; or stereopure of nucleotide. Chemical modifications to the engineered guide RNA include any modification contained herein, while some exemplary modifications are recited in Table 2.

TABLE 2
Exemplary Chemical Modification

| Modification of | |
|---|---|
| engineered guide RNA | Examples |
| Modification of one or both | sulfur (S), selenium (Se), BR3 (wherein R can be, e.g., hydrogen, |
| of the non-linking | alkyl, or aryl), C (e.g., an alkyl group, an aryl group, and the like), |
| phosphate oxygens in the | H, NR2, wherein R can be, e.g., hydrogen, alkyl, or aryl, or |
| phosphodiester backbone | wherein R can be, e.g., alkyl or aryl |
| linkage | |
| Modification of one or more | sulfur (S), selenium (Se), BR3 (wherein R can be, e.g., hydrogen, |
| of the linking phosphate | alkyl, or aryl), C (e.g., an alkyl group, an aryl group, and the like), |
| oxygens in the | H, NR2, wherein R can be, e.g., hydrogen, alkyl, or aryl, or |
| phosphodiester backbone | wherein R can be, e.g., alkyl or aryl |
| linkage | |
| Replacement of the | methyl phosphonate, hydroxylamino, siloxane, carbonate, |
| phosphate moiety with | carboxymethyl, carbamate, amide, thioether, ethylene oxide linker, |
| “dephospho” linkers | sulfonate, sulfonamide, thioformacetal, formacetal, oxime, |
| | methyleneimino, methylenemethylimino, methylenehydrazo, |
| | methylenedimethylhydrazo, or methyleneoxymethylimino |
| Modification or | Nucleic acid analog (examples of nucleotide analogs can be found |
| replacement of a naturally | in PCT/US2015/025175, PCT/US2014/050423, |
| occurring nucleobase | PCT/US2016/067353, PCT/US2018/041503, PCT/US18/041509, |
| | PCT/US2004/011786, or PCT/US2004/011833, all of which are |
| | expressly incorporated by reference in their entireties |
| Modification of the ribose- | phosphorothioate, phosphonothioacetate, phosphoroselenates, |
| phosphate backbone | boranophosphates, borano phosphate esters, hydrogen |
| | phosphonates, phosphonocarboxylate, phosphoroamidates, alkyl or |
| | aryl phosphonates, phosphonoacetate, or phosphotriesters |
| Modification of 5′ end of | 5′ cap or modification of 5′ cap —OH |
| polynucleotide | |
| Modification of 3′ end of | 3′ tail or modification of 3′ end —OH |
| polynucleotide | |
| Modification of the | phosphorothioate, phosphonothioacetate, phosphoroselenates, |
| deoxyribose phosphate | borano phosphates, borano phosphate esters, hydrogen |
| backbone | phosphonates, phosphoroamidates, alkyl or aryl phosphonates, or |
| | phosphotriesters |
| Substitution of the | methyl phosphonate, hydroxylamino, siloxane, carbonate, |
| phosphate group | carboxymethyl, carbamate, amide, thioether, ethylene oxide linker, |
| | sulfonate, sulfonamide, thioformacetal, formacetal, oxime, |
| | methyleneimino, methylenemethylimino, methylenehydrazo, |
| | methylenedimethylhydrazo, or methyleneoxymethylimino. |
| Modification of the | morpholino, cyclobutyl, pyrrolidine, or peptide nucleic acid (PNA) |
| ribophosphate backbone | nucleoside surrogates |
| Modifications to the sugar | Locked nucleic acid (LNA), unlocked nucleic acid (UNA), or |
| of a nucleotide | bridged nucleic acid (BNA) |
| Modification of a | 2′-O-methyl, 2′-O-methoxy-ethyl (2′-MOE), 2′-fluoro, 2′- |
| constituent of the ribose | aminoethyl, 2′-deoxy-2′-fuloarabinou-cleic acid, 2′-deoxy, 2′-O- |
| sugar | methyl, 3′-phosphorothioate, 3′-phosphonoacetate (PACE), or 3′- |
| | phosphonothioacetate (thioPACE) |
| Modifications to the base of | Modification of A, T, C, G, or U |
| a nucleotide | |
| Stereopure of nucleotide | S conformation of phosphorothioate or R conformation of |
| | phosphorothioate |

### Modification of Phosphate Backbone

[0252] In some embodiments, the chemical modification comprises modification of one or both of the non-linking phosphate oxygens in the phosphodiester backbone linkage or modification of one or more of the linking phosphate oxygens in the phosphodiester backbone linkage. As used herein, “alkyl” may be meant to refer to a saturated hydrocarbon group which may be straight-chained or branched. Example alkyl groups include methyl (Me), ethyl (Et), propyl (e.g., n-propyl or isopropyl), butyl (e.g., n-butyl, isobutyl, or t-butyl), or pentyl (e.g., n-pentyl, isopentyl, or neopentyl). An alkyl group can contain from 1 to about 20, from 2 to about 20, from 1 to about 12, from 1 to about 8, from 1 to about 6, from 1 to about 4, or from 1 to about 3 carbon atoms. As used herein, “aryl” may refer to monocyclic or polycyclic (e.g., having 2, 3, or 4 fused rings) aromatic hydrocarbons such as, for example, phenyl, naphthyl, anthracenyl, phenanthrenyl, indanyl, or indenyl. In some embodiments, aryl groups have from 6 to about 20 carbon atoms. As used herein, “alkenyl” may refer to an aliphatic group containing at least one double bond. As used herein, “alkynyl” may refer to a straight or branched hydrocarbon chain containing 2-12 carbon atoms and characterized in having one or more triple bonds. Examples of alkynyl groups can include ethynyl, propargyl, or 3-hexynyl. “Arylalkyl” or “aralkyl” may refer to an alkyl moiety in which an alkyl hydrogen atom may be replaced by an aryl group. Aralkyl includes groups in which more than one hydrogen atom has been replaced by an aryl group. Examples of “arylalkyl” or “aralkyl” include benzyl, 2-phenylethyl, 3-phenylpropyl, 9-fluorenyl, benzhydryl, and trityl groups. “Cycloalkyl” may refer to a cyclic, bicyclic, tricyclic, or polycyclic non-aromatic hydrocarbon groups having 3 to 12 carbons. Examples of cycloalkyl moieties include, but are not limited to, cyclopropyl, cyclopentyl, and cyclohexyl. “Heterocyclyl” may refer to a monovalent radical of a heterocyclic ring system. Representative heterocyclyls include, without limitation, tetrahydrofuranyl, tetrahydrothienyl, pyrrolidinyl, pyrrolidonyl, piperidinyl, pyrrolinyl, piperazinyl, dioxanyl, dioxolanyl, diazepinyl, oxazepinyl, thiazepinyl, and morpholinyl. “Heteroaryl” may refer to a monovalent radical of a heteroaromatic ring system. Examples of heteroaryl moieties can include imidazolyl, oxazolyl, thiazolyl, triazolyl, pyrrolyl, furanyl, indolyl, thiophenyl pyrazolyl, pyridinyl, pyrazinyl, pyridazinyl, pyrimidinyl, indolizinyl, purinyl, naphthyridinyl, quinolyl, and pteridinyl.

[0253] In some embodiments, the phosphate group of a chemically modified nucleotide can be modified by replacing one or more of the oxygens with a different substituent. In some embodiments, the chemically modified nucleotide can include replacement of an unmodified phosphate moiety with a modified phosphate as described herein. In some embodiments, the modification of the phosphate backbone can include alterations that result in either an uncharged linker or a charged linker with unsymmetrical charge distribution. Examples of modified phosphate groups can include phosphorothioate, phosphonothioacetate, phosphoroselenates, boranophosphates, boranophosphate esters, hydrogen phosphonates, phosphoroamidates, alkyl or aryl phosphonates and phosphotriesters. In some embodiments, one of the non-bridging phosphate oxygen atoms in the phosphate backbone moiety can be replaced by any of the following groups: sulfur (S), selenium (Se), BR3 (wherein R can be, e.g., hydrogen, alkyl, or aryl), C (e.g., an alkyl group, an aryl group, and the like), H, NR2 (wherein R can be, e.g., hydrogen, alkyl, or aryl), or (wherein R can be, e.g., alkyl or aryl). The phosphorous atom in an unmodified phosphate group can be achiral. However, replacement of one of the non-bridging oxygens with one of the above atoms or groups of atoms can render the phosphorous atom chiral. A phosphorous atom in a phosphate group modified in this way may be a stereogenic center. The stereogenic phosphorous atom can possess either the “R” configuration (herein Rp) or the “S” configuration (herein Sp). In some cases, the engineered guide RNA can comprise stereopure nucleotides comprising S conformation of phosphorothioate or R conformation of phosphorothioate. In some embodiments, the chiral phosphate product may be present in a diastereomeric excess of 50%, 60%, 70%, 80%, 90%, or more. In some embodiments, the chiral phosphate product may be present in a diastereomeric excess of 95%. In some embodiments, the chiral phosphate product may be present in a diastereomeric excess of 96%. In some embodiments, the chiral phosphate product may be present in a diastereomeric excess of 97%. In some embodiments, the chiral phosphate product may be present in a diastereomeric excess of 98%. In some embodiments, the chiral phosphate product may be present in a diastereomeric excess of 99%. In some embodiments, both non-bridging oxygens of phosphorodithioates can be replaced by sulfur. The phosphorus center in the phosphorodithioates can be achiral which precludes the formation of oligoribonucleotide diastereomers. In some embodiments, modifications to one or both non-bridging oxygens can also include the replacement of the non-bridging oxygens with a group independently selected from S, Se, B, C, H, N, and OR (R can be, e.g., alkyl or aryl). In some embodiments, the phosphate linker can also be modified by replacement of a bridging oxygen, (i.e., the oxygen that links the phosphate to the nucleoside), with nitrogen (bridged phosphoroamidates), sulfur (bridged phosphorothioates) and carbon (bridged methylenephosphonates). The replacement can occur at either or both of the linking oxygens.

[0254] In certain embodiments, nucleic acids comprise linked nucleic acids. Nucleic acids can be linked together using any inter nucleic acid linkage. The two main classes of inter nucleic acid linking groups are defined by the presence or absence of a phosphorus atom. Representative phosphorus containing inter nucleic acid linkages include, but are not limited to, phosphodiesters, phosphotriesters, methylphosphonates, phosphoramidate, and phosphorothioates (P═S). Representative non-phosphorus containing inter nucleic acid linking groups include, but are not limited to, methylenemethylimino (—CH₂—N(CH₃)—O—CH₂—), thiodiester (—O—C(O)—S—), thionocarbamate (—O—C(O)(NH)—S—); siloxane (—O—Si(H)₂—O—); and N,N*-dimethylhydrazine (—CH₂—N(CH₃)—N(CH₃)). In certain embodiments, inter nucleic acids linkages having a chiral atom can be prepared as a racemic mixture, as separate enantiomers, e.g., alkylphosphonates and phosphorothioates. Unnatural nucleic acids can contain a single modification. Unnatural nucleic acids can contain multiple modifications within one of the moieties or between different moieties.

[0255] Backbone phosphate modifications to nucleic acid include, but are not limited to, methyl phosphonate, phosphorothioate, phosphoramidate (bridging or non-bridging), phosphotriester, phosphorodithioate, phosphodithioate, and boranophosphate, and can be used in any combination. Other non-phosphate linkages may also be used.

[0256] In some embodiments, backbone modifications (e.g., methylphosphonate, phosphorothioate, phosphoroamidate and phosphorodithioate internucleotide linkages) can confer immunomodulatory activity on the modified nucleic acid and/or enhance their stability in vivo.

[0257] In some instances, a phosphorous derivative (or modified phosphate group) may be attached to the sugar or sugar analog moiety in and can be a monophosphate, diphosphate, triphosphate, alkylphosphonate, phosphorothioate, phosphorodithioate, phosphoramidate or the like.

[0258] In some cases, backbone modification comprises replacing the phosphodiester linkage with an alternative moiety such as an anionic, neutral or cationic group. Examples of such modifications include: anionic internucleoside linkage; N3′ to P5′ phosphoramidate modification; boranophosphate DNA; prooligonucleotides; neutral internucleoside linkages such as methylphosphonates; amide linked DNA; methylene(methylimino) linkages; formacetal and thioformacetal linkages; backbones containing sulfonyl groups; morpholino oligos; peptide nucleic acids (PNA); and positively charged deoxyribonucleic guanidine (DNG) oligos. A modified nucleic acid may comprise a chimeric or mixed backbone comprising one or more modifications, e.g. a combination of phosphate linkages such as a combination of phosphodiester and phosphorothioate linkages.

[0259] Substitutes for the phosphate include, for example, short chain alkyl or cycloalkyl internucleoside linkages, mixed heteroatom and alkyl or cycloalkyl internucleoside linkages, or one or more short chain heteroatomic or heterocyclic internucleoside linkages. These include those having morpholino linkages (formed in part from the sugar portion of a nucleoside); siloxane backbones; sulfide, sulfoxide and sulfone backbones; formacetyl and thioformacetyl backbones; methylene formacetyl and thioformacetyl backbones; alkene containing backbones; sulfamate backbones; methyleneimino and methylenehydrazino backbones; sulfonate and sulfonamide backbones; amide backbones; and others having mixed N, O, S and CH₂ component parts. It may be also understood in a nucleotide substitute that both the sugar and the phosphate moieties of the nucleotide can be replaced, by for example an amide type linkage (aminoethylglycine) (PNA). It may be also possible to link other types of molecules (conjugates) to nucleotides or nucleotide analogs to enhance for example, cellular uptake. Conjugates can be chemically linked to the nucleotide or nucleotide analogs. Such conjugates include but are not limited to lipid moieties such as a cholesterol moiety, a thioether, e.g., hexyl-S-tritylthiol, a thiocholesterol, an aliphatic chain, e.g., dodecandiol or undecyl residues, a phospholipid, e.g., di-hexadecyl-rac-glycerol or triethylammonium 1-di-O-hexadecyl-rac-glycero-S—H-phosphonate, a polyamine or a polyethylene glycol chain, or adamantane acetic acid, a palmityl moiety, or an octadecylamine or hexylamino-carbonyl-oxycholesterol moiety.

[0260] In some embodiments, the chemical modification described herein comprises modification of a phosphate backbone. In some embodiments, the engineered guide RNA described herein comprises at least one chemically modified phosphate backbone. Exemplary chemically modification of the phosphate group or backbone can include replacing one or more of the oxygens with a different substituent. Furthermore, the modified nucleotide present in the engineered guide RNA can include the replacement of an unmodified phosphate moiety with a modified phosphate as described herein. In some embodiments, the modification of the phosphate backbone can include alterations resulting in either an uncharged linker or a charged linker with unsymmetrical charge distribution. Exemplary modified phosphate groups can include, phosphorothioate, phosphonothioacetate, phosphoroselenates, borano phosphates, borano phosphate esters, hydrogen phosphonates, phosphoroamidates, alkyl or aryl phosphonates and phosphotriesters. In some embodiments, one of the non-bridging phosphate oxygen atoms in the phosphate backbone moiety can be replaced by any of the following groups: sulfur (S), selenium (Se), BR₃ (wherein R can be, e.g., hydrogen, alkyl, or aryl), C (e.g., an alkyl group, an aryl group, and the like), H, NR₂ (wherein R can be, e.g., hydrogen, alkyl, or aryl), or OR (wherein R can be, e.g., alkyl or aryl). The phosphorous atom in an unmodified phosphate group may be achiral. However, replacement of one of the non-bridging oxygens with one of the above atoms or groups of atoms can render the phosphorous atom chiral; that may be to say that a phosphorous atom in a phosphate group modified in this way may be a stereogenic center. The stereogenic phosphorous atom can possess either the “R” configuration (herein Rp) or the “S” configuration (herein Sp). In such case, the chemically modified engineered guide RNA can be stereopure (e.g. S or R confirmation). In some cases, the chemically modified engineered guide RNA comprises stereopure phosphate modification. For example, the chemically modified engineered guide RNA can comprise S conformation of phosphorothioate or R conformation of phosphorothioate.

[0261] Phosphorodithioates have both non-bridging oxygens replaced by sulfur. The phosphorus center in the phosphorodithioates may be achiral which precludes the formation of oligoribonucleotide diastereomers. In some embodiments, modifications to one or both non-bridging oxygens can also include the replacement of the non-bridging oxygens with a group independently selected from S, Se, B, C, H, N, and OR (R can be, e.g., alkyl or aryl).

[0262] he phosphate linker can also be modified by replacement of a bridging oxygen, (i.e., the oxygen that links the phosphate to the nucleoside), with nitrogen (bridged phosphoroamidates), sulfur (bridged phosphorothioates) and carbon (bridged methylenephosphonates). The replacement can occur at either linking oxygen or at both of the linking oxygens.

### Replacement of Phosphate Moiety

[0263] In some embodiments, at least one phosphate group of the engineered guide RNA can be chemically modified. In some embodiments, the phosphate group can be replaced by non-phosphorus containing connectors. In some embodiments, the phosphate moiety can be replaced by dephospho linker. In some embodiments, the charge phosphate group can be replaced by a neutral group. In some cases, the phosphate group can be replaced by methyl phosphonate, hydroxylamino, siloxane, carbonate, carboxymethyl, carbamate, amide, thioether, ethylene oxide linker, sulfonate, sulfonamide, thioformacetal, formacetal, oxime, methyleneimino, methylenemethylimino, methylenehydrazo, methylenedimethylhydrazo and methyleneoxymethylimino. In some embodiments, nucleotide analogs described herein can also be modified at the phosphate group. Modified phosphate group can include modification at the linkage between two nucleotides with phosphorothioate, chiral phosphorothioate, phosphorodithioate, phosphotriester, aminoalkylphosphotriester, methyl and other alkyl phosphonates including 3′-alkylene phosphonate and chiral phosphonates, phosphinates, phosphoramidates (e.g. 3′-amino phosphoramidate and aminoalkylphosphoramidates), thionophosphoramidates, thionoalkylphosphonates, thionoalkylphosphotriesters, and boranophosphates. The phosphate or modified phosphate linkage between two nucleotides can be through a 3′-5′ linkage or a 2′-5′ linkage, and the linkage contains inverted polarity such as 3′-5′ to 5′-3′ or 2′-5′ to 5′-2′.

### Substitution of Phosphate Group

[0264] In some embodiments, the chemical modification described herein comprises modification by replacement of a phosphate group. In some embodiments, the engineered guide RNA described herein comprises at least one chemically modification comprising a phosphate group substitution or replacement. Exemplary phosphate group replacement can include non-phosphorus containing connectors. In some embodiments, the phosphate group substitution or replacement can include replacing charged phosphate group can by a neutral moiety. Exemplary moieties which can replace the phosphate group can include methyl phosphonate, hydroxylamino, siloxane, carbonate, carboxymethyl, carbamate, amide, thioether, ethylene oxide linker, sulfonate, sulfonamide, thioformacetal, formacetal, oxime, methyleneimino, methylenemethylimino, methylenehydrazo, methylenedimethylhydrazo and methyleneoxymethylimino.

### Modification of the Ribophosphate Backbone

[0265] In some embodiments, the chemical modification described herein comprises modifying ribophosphate backbone of the engineered guide RNA. In some embodiments, the engineered guide RNA described herein comprises at least one chemically modified ribophosphate backbone. Exemplary chemically modified ribophosphate backbone can include scaffolds that can mimic nucleic acids can also be constructed wherein the phosphate linker and ribose sugar may be replaced by nuclease resistant nucleoside or nucleotide surrogates. In some embodiments, the nucleobases can be tethered by a surrogate backbone. Examples can include morpholino, cyclobutyl, pyrrolidine and peptide nucleic acid (PNA) nucleoside surrogates.

### Modification of Sugar

[0266] In some embodiments, the chemical modification described herein comprises modifying of sugar. In some embodiments, the engineered guide RNA described herein comprises at least one chemically modified sugar. Exemplary chemically modified sugar can include 2′ hydroxyl group (OH) modified or replaced with a number of different “oxy” or “deoxy” substituents. In some embodiments, modifications to the 2′ hydroxyl group can enhance the stability of the nucleic acid since the hydroxyl can no longer be deprotonated to form a 2′-alkoxide ion. The 2′-alkoxide can catalyze degradation by intramolecular nucleophilic attack on the linker phosphorus atom. Examples of “oxy”-2′ hydroxyl group modifications can include alkoxy or aryloxy (OR, wherein “R” can be, e.g., alkyl, cycloalkyl, aryl, aralkyl, heteroaryl or a sugar); polyethyleneglycols (PEG), O(CH₂CH₂O)ₙCH2CH₂OR, wherein R can be, e.g., H or optionally substituted alkyl, and n can be an integer from 0 to 20 (e.g., from 0 to 4, from 0 to 8, from 0 to 10, from 0 to 16, from 1 to 4, from 1 to 8, from 1 to 10, from 1 to 16, from 1 to 20, from 2 to 4, from 2 to 8, from 2 to 10, from 2 to 16, from 2 to 20, from 4 to 8, from 4 to 10, from 4 to 16, and from 4 to 20). In some embodiments, the “oxy”-2′ hydroxyl group modification can include (LNA, in which the 2′ hydroxyl can be connected, e.g., by a Ci-₆ alkylene or Cj-6 heteroalkylene bridge, to the 4′ carbon of the same ribose sugar, where exemplary bridges can include methylene, propylene, ether, or amino bridges; O-amino (wherein amino can be, e.g., NH₂; alkylamino, dialkylamino, heterocyclyl, arylamino, diarylamino, heteroarylamino, or diheteroarylamino, ethylenediamine, or polyamino) and aminoalkoxy, O(CH₂)ₙ-amino, (wherein amino can be, e.g., NH₂; alkylamino, dialkylamino, heterocyclyl, arylamino, diarylamino, heteroarylamino, or diheteroarylamino, ethylenediamine, or polyamino). In some embodiments, the “oxy”-2′ hydroxyl group modification can include the methoxyethyl group (MOE), (OCH₂CH₂OCH₃, e.g., a PEG derivative). In some cases, the deoxy modifications can include hydrogen (i.e. deoxyribose sugars, e.g., at the overhang portions of partially dsRNA); halo (e.g., bromo, chloro, fluoro, or iodo); amino (wherein amino can be, e.g., NH₂; alkylamino, dialkylamino, heterocyclyl, arylamino, diarylamino, heteroarylamino, diheteroarylamino, or amino acid); NH(CH₂CH₂NH)ₙCH2CH₂-amino (wherein amino can be, e.g., as described herein),NHC(O)R (wherein R can be, e.g., alkyl, cycloalkyl, aryl, aralkyl, heteroaryl or sugar), cyano; mercapto; alkyl-thio-alkyl; thioalkoxy; and alkyl, cycloalkyl, aryl, alkenyl and alkynyl, which can be optionally substituted with e.g., an amino as described herein. In some instances, the sugar group can also contain one or more carbons that possess the opposite stereochemical configuration than that of the corresponding carbon in ribose. Thus, a modified nucleic acid can include nucleotides containing e.g., arabinose, as the sugar. The nucleotide “monomer” can have an alpha linkage at the F position on the sugar, e.g., alpha-nucleosides. The modified nucleic acids can also include “abasic” sugars, which lack a nucleobase at C—. The abasic sugars can also be further modified at one or more of the constituent sugar atoms. The modified nucleic acids can also include one or more sugars that may be in the L form, e.g. L-nucleosides. In some aspects, the engineered guide RNA described herein includes the sugar group ribose, which may be a 5-membered ring having an oxygen. Exemplary modified nucleosides and modified nucleotides can include replacement of the oxygen in ribose (e.g., with sulfur (S), selenium (Se), or alkylene, such as, e.g., methylene or ethylene); addition of a double bond (e.g., to replace ribose with cyclopentenyl or cyclohexenyl); ring contraction of ribose (e.g., to form a 4-membered ring of cyclobutane or oxetane); ring expansion of ribose (e.g., to form a 6- or 7-membered ring having an additional carbon or heteroatom, such as for example, anhydrohexitol, altritol, mannitol, cyclohexanyl, cyclohexenyl, and morpholino that also has a phosphoramidate backbone). In some embodiments, the modified nucleotides can include multicyclic forms (e.g., tricyclo; and “unlocked” forms, such as glycol nucleic acid (GNA) (e.g., R-GNA or S-GNA, where ribose may be replaced by glycol units attached to phosphodiester bonds), threose nucleic acid. In some embodiments, the modifications to the sugar of the engineered guide RNA comprises modifying the engineered guide RNA to include locked nucleic acid (LNA), unlocked nucleic acid (UNA), or bridged nucleic acid (BNA).

### Modification of a Constituent of the Ribose Sugar

[0267] In some embodiments, the engineered guide RNA described herein comprises at least one chemical modification of a constituent of the ribose sugar. In some embodiments, the chemical modification of the constituent of the ribose sugar can include 2′-O-methyl, 2′-O-methoxy-ethyl (2′-MOE), 2′-fluoro, 2′-aminoethyl, 2′-deoxy-2′-fuloarabinou-cleic acid, 2′-deoxy, 2′-O-methyl, 3′-phosphorothioate, 3′-phosphonoacetate (PACE), or 3′-phosphonothioacetate (thioPACE). In some embodiments, the chemical modification of the constituent of the ribose sugar comprises unnatural nucleic acid. In some instances, the unnatural nucleic acids include modifications at the 5′-position and the 2′-position of the sugar ring, such as 5′-CH₂-substituted 2′-O-protected nucleosides. In some cases, unnatural nucleic acids include amide linked nucleoside dimers have been prepared for incorporation into oligonucleotides wherein the 3′ linked nucleoside in the dimer (5′ to 3′) comprises a 2′-OCH₃ and a 5′-(S)—CH₃. Unnatural nucleic acids can include 2′-substituted 5′-CH₂ (or O) modified nucleosides. Unnatural nucleic acids can include 5′-methylenephosphonate DNA and RNA monomers, and dimers. Unnatural nucleic acids can include 5′-phosphonate monomers having a 2′-substitution and other modified 5′-phosphonate monomers. Unnatural nucleic acids can include 5′-modified methylenephosphonate monomers. Unnatural nucleic acids can include analogs of 5′ or 6′-phosphonate ribonucleosides comprising a hydroxyl group at the 5′ and/or 6′-position. Unnatural nucleic acids can include 5′-phosphonate deoxyribonucleoside monomers and dimers having a 5′-phosphate group. Unnatural nucleic acids can include nucleosides having a 6′-phosphonate group wherein the 5′ or/and 6′-position may be unsubstituted or substituted with a thio-tert-butyl group (SC(CH₃)₃) (and analogs thereof); a methyleneamino group (CH₂NH₂) (and analogs thereof) or a cyano group (CN) (and analogs thereof).

[0268] In some embodiments, unnatural nucleic acids also include modifications of the sugar moiety. In some cases, nucleic acids contain one or more nucleosides wherein the sugar group has been modified. Such sugar modified nucleosides may impart enhanced nuclease stability, increased binding affinity, or some other beneficial biological property. In certain embodiments, nucleic acids comprise a chemically modified ribofuranose ring moiety. Examples of chemically modified ribofuranose rings include, without limitation, addition of substituent groups (including 5′ and/or 2′ substituent groups; bridging of two ring atoms to form bicyclic nucleic acids; replacement of the ribosyl ring oxygen atom with S, N(R), or C(R₁)(R₂) (R=H, C₁-C₁₂ alkyl or a protecting group); and combinations thereof.

[0269] In some instances, the engineered guide RNA described herein comprises modified sugars or sugar analogs. Thus, in addition to ribose and deoxyribose, the sugar moiety can be pentose, deoxypentose, hexose, deoxyhexose, glucose, arabinose, xylose, lyxose, or a sugar “analog” cyclopentyl group. The sugar can be in a pyranosyl or furanosyl form. The sugar moiety can be the furanoside of ribose, deoxyribose, arabinose or 2′-O-alkylribose, and the sugar can be attached to the respective heterocyclic bases either in [alpha] or [beta] anomeric configuration. Sugar modifications include, but are not limited to, 2′-alkoxy-RNA analogs, 2′-amino-RNA analogs, 2′-fluoro-DNA, and 2′-alkoxy- or amino-RNA/DNA chimeras. For example, a sugar modification may include 2′-O-methyl-uridine or 2′-O-methyl-cytidine. Sugar modifications include 2′-O-alkyl-substituted deoxyribonucleosides and 2′-O-ethyleneglycol-like ribonucleosides.

[0270] Modifications to the sugar moiety include natural modifications of the ribose and deoxy ribose as well as unnatural modifications. Sugar modifications include, but are not limited to, the following modifications at the 2′ position: OH; F; O—, S—, or N-alkyl; O—, S—, or N-alkenyl; O—, S- or N-alkynyl; or O-alkyl-O-alkyl, wherein the alkyl, alkenyl and alkynyl can be substituted or unsubstituted C₁ to C₁₀, alkyl or C₂ to C₁₀ alkenyl and alkynyl, 2′ sugar modifications also include but are not limited to—O[(CH₂)ₙO]ₘ CH₃,—O(CH₂)ₙOCH₃,—O(CH₂)ₙNH₂,—O(CH₂)ₙCH₃,—O(CH₂)ₙONH₂, and —O(CH₂)ₙON[(CH₂)n CH₃)]₂, where n and m may be from 1 to about 10. Other chemical modifications at the 2′ position include but are not limited to: C₁ to C₁₀ lower alkyl, substituted lower alkyl, alkaryl, aralkyl, O-alkaryl, O-aralkyl, SH, SCH₃, OCN, Cl, Br, CN, CF₃, OCF₃, SOCH₃, SO₂ CH₃, ONO₂, NO₂, N₃, NH₂, heterocycloalkyl, heterocycloalkaryl, aminoalkylamino, polyalkylamino, substituted silyl, an RNA cleaving group, a reporter group, an intercalator, a group for improving the pharmacokinetic properties of an oligonucleotide, or a group for improving the pharmacodynamic properties of an oligonucleotide, and other substituents having similar properties. Similar modifications may also be made at other positions on the sugar, particularly the 3′ position of the sugar on the 3′ terminal nucleotide or in 2′-5′ linked oligonucleotides and the 5′ position of the 5′ terminal nucleotide. Chemically modified sugars also include those that contain modifications at the bridging ring oxygen, such as CH₂ and S. Nucleotide sugar analogs can also have sugar mimetics such as cyclobutyl moieties in place of the pentofuranosyl sugar. Examples of nucleic acids having modified sugar moieties include, without limitation, nucleic acids comprising 5′-vinyl, 5′-methyl (R or S), 4′-S, 2′-F, 2′-OCH₃, and 2′-O(CH₂)₂OCH₃ substituent groups. The substituent at the 2′ position can also be selected from allyl, amino, azido, thio, O-allyl, O—(C₁-C₁₀ alkyl), OCF₃, O(CH₂)₂SCH₃, O(CH₂)₂—O—N(Rₘ)(Rₙ), and O—CH₂—C(═O)—N(Rₘ)(Rₙ), where each Rₘ and Rₙ is, independently, H or substituted or unsubstituted C₁-C₁₀ alkyl.

[0271] In certain embodiments, nucleic acids described herein include one or more bicyclic nucleic acids. In certain such embodiments, the bicyclic nucleic acid comprises a bridge between the 4′ and the 2′ ribosyl ring atoms. In certain embodiments, nucleic acids provided herein include one or more bicyclic nucleic acids wherein the bridge comprises a 4′ to 2′ bicyclic nucleic acid. Examples of such 4′ to 2′ bicyclic nucleic acids include, but are not limited to, one of the formulae: 4′-(CH₂)—O-2′ (LNA); 4′-(CH₂)—S-2′; 4′-(CH₂)₂—O-2′ (ENA); 4′-CH(CH₃)—O-2′ and 4′-CH(CH₂OCH₃)—O-2′, and analogs thereof; 4′-C(CH₃)(CH₃)—O-2′and analogs thereof.

### Modifications on the Base of Nucleotide

[0272] In some embodiments, the chemical modification described herein comprises modification of the base of nucleotide (e.g. the nucleobase). Exemplary nucleobases can include adenine (A), thymine (T), guanine (G), cytosine (C), and uracil (U). These nucleobases can be modified or replaced to in the engineered guide RNA described herein. The nucleobase of the nucleotide can be independently selected from a purine, a pyrimidine, a purine or pyrimidine analog. In some embodiments, the nucleobase can be naturally-occurring or synthetic derivatives of a base.

[0273] In some embodiments, the chemical modification described herein comprises modifying an uracil. In some embodiments, the engineered guide RNA described herein comprises at least one chemically modified uracil. Exemplary chemically modified uracil can include pseudouridine, pyridin-4-one ribonucleoside, 5-aza-uridine, 6-aza-uridine, 2-thio-5-aza-uridine, 2-thio-uridine, 4-thio-uridine, 4-thio-pseudouridine, 2-thio-pseudouridine, 5-hydroxy-uridine, 5-aminoallyl-uridine, 5-halo-uridine (e.g., 5-iodo-uridine or 5-bromo-uridine), 3-methyl-uridine, 5-methoxy-uridine, uridine 5-oxyacetic acid, uridine 5-oxyacetic acid methyl ester, 5-carboxymethyl-uridine, 1-carboxymethyl-pseudouridine, 5-carboxyhydroxymethyl-uridine, 5-carboxyhydroxymethyl-uridine methyl ester, 5-methoxycarbonylmethyl-uridine, 5-methoxycarbonylmethyl-2-thio-uridine, 5-aminomethyl-2-thio-uridine, 5-methylaminomethyl-uridine, 5-methylaminomethyl-2-thio-uridine, 5-methylaminomethyl-2-seleno-uridine, 5-carbamoylmethyl-uridine, 5-carboxymethylaminomethyl-uridine, 5-carboxymethylaminomethyl-2-thio-uridine, 5-propynyl-uridine, 1-propynyl-pseudouridine, 5-taurinomethyl-uridine, 1-taurinomethyl-pseudouridine, 5-taurinomethyl-2-thio-uridine, 1-taurinomethyl-4-thio-pseudouridine, 5-methyl-uridine, 1 methyl-pseudouridine, 5-methyl-2-thio-uridine, 1-methyl-4-thio-pseudouridine, 4-thio-1-methyl-pseudouridine, 3-methyl-pseudouridine, 2-thio-1-methyl-pseudouridine, 1-methyl-1-deaza-pseudouridine, 2-thio-1-methyl-1-deaza-pseudouridine, dihydroundine, dihydropseudoundine, 5,6-dihydrouridine, 5-methyl-dihydrouridine, 2-thio-dihydrouridine, 2-thio-dihydropseudouridine, 2-methoxy-uridine, 2-methoxy-4-thio-uridine, 4-methoxy-pseudouridine, 4-methoxy-2-thio-pseudouridine, N₁-methyl-pseudouridine, 3-(3-amino-3-carboxypropyl) uridine, 1-methyl-3-(3-amino-3-carboxypropy pseudouridine, 5-(isopentenylaminomethyl) uridine, 5-(isopentenylaminomethy])-2-thio-uridine, a-thio-uridine, 2′-O-methyl-uridine, 5,2′-O-dimethyl-uridine, 2′-O-methyl-pseudouridine, 2-thio-2′-O-methyl-uridine, 5-methoxycarbonylmethyl-2′-O-methyl-uridine, 5-carbamoylmethyl-2′-O-methyl-uridine, 5-carboxymethylaminomethyl-2′-O-methyl-uridine, 3,2′-O-dimethyl-uridine, 5-(isopentenylaminomethyl)-2′-O-methyl-uridine, 1-thio-uridine, deoxythymidine, 2′-F-ara-uridine, 2′-F-uridine, 2′-OH-ara-uridine, 5-(2-carbomethoxyvinyl) uridine, 5-[3-(1-E-propenylamino)uridine, pyrazolo[3,4-d]pyrimidines, xanthine, and hypoxanthine.

[0274] In some embodiments, the chemical modification described herein comprises modifying a cytosine. In some embodiments, the engineered guide RNA described herein comprises at least one chemically modified cytosine. Exemplary chemically modified cytosine can include 5-aza-cytidine, 6-aza-cytidine, pseudoisocytidine, 3-methyl-cytidine, N₄-acetyl-cytidine, 5-formyl-cytidine, N₄-methyl-cytidine, 5-methyl-cytidine, 5-halo-cytidine, 5-hydroxymethyl-cytidine, 1-methyl-pseudoisocytidine, pyrrolo-cytidine, pyrrolo-pseudoisocytidine, 2-thio-cytidine, 2-thio-5-methyl-cytidine, 4-thio-pseudoisocytidine, 4-thio-1-methyl-pseudoisocytidine, 4-thio-1-methyl-1-deaza-pseudoisocytidine, 1-methyl-1-deaza-pseudoisocytidine, zebularine, 5-aza-zebularine, 5-methyl-zebularine, 5-aza-2-thio-zebularine, 2-thio-zebularine, 2-methoxy-cytidine, 2-methoxy-5-methyl-cytidine, 4-methoxy-pseudoisocytidine, 4-methoxy-1-methyl-pseudoisocytidine, lysidine, a-thio-cytidine, 2′-O-methyl-cytidine, 5,2′-O-dimethyl-cytidine, N₄-acetyl-2′-O-methyl-cytidine, N4,2′-O-dimethyl-cytidine, 5-formyl-2′-O-methyl-cytidine, N4,N4,2′-O-trimethyl-cytidine, 1-thio-cytidine, 2′-F-ara-cytidine, 2′-F-cytidine, and 2′-OH-ara-cytidine.

[0275] In some embodiments, the chemical modification described herein comprises modifying a adenine. In some embodiments, the engineered guide RNA described herein comprises at least one chemically modified adenine. Exemplary chemically modified adenine can include 2-amino-purine, 2,6-diaminopurine, 2-amino-6-halo-purine (e.g., 2-amino-6-chloro-purine), 6-halo-purine (e.g., 6-chloi-purine), 2-amino-6-methyl-purine, 8-azido-adenosine, 7-deaza-adenine, 7-deaza-8-aza-adenine, 7-deaza-2-amino-purine, 7-deaza-8-aza-2-amino-purine, 7-deaza-2,6-diaminopurine, 7-deaza-8-aza-2,6-diaminopurine, 1-methyl-adenosine, 2-methyl-adenine, N6-methyl-adenosine, 2-methylthio-N6-methyl-adenosine, N6-isopentenyl-adenosine, 2-methylthio-N6-isopentenyl-adenosine, N6-(cis-hydroxyisopentenyl) adenosine, 2-methylthio-N6-(cis-hydroxyisopentenyl) adenosine, N6-glycinylcarbamoyl-adenosine, N6-threonylcarbamoyl-adenosine, N6-methyl-N6-threonylcarbamoyl-adenosine, 2-methylthio-N6-threonylcarbamoyl-adenosine, N6, N6-dimethyl-adenosine, N6-hydroxynorvalylcarbamoyl-adenosine, 2-methylthio-N6-hydroxynorvalylcarbamoyl-adenosine, N6-acetyl-adenosine, 7-methyl-adenine, 2-methylthio-adenine, 2-methoxy-adenine, a-thio-adenosine, 2′-O-methyl-adenosine, N6, 2′-O-dimethyl-adenosine, N6-Methyl-2′-deoxyadenosine, N6, N6, 2′-O-trimethyl-adenosine, 1,2′-O-dimethyl-adenosine, 2′-O-ribosyladenosine (phosphate) (Ar(p)), 2-amino-N6-methyl-purine, 1-thio-adenosine, 8-azido-adenosine, 2′-F-ara-adenosine, 2′-F-adenosine, 2′-OH-ara-adenosine, and N6-(19-amino-pentaoxanonadecyl)-adenosine.

[0276] In some embodiments, the chemical modification described herein comprises modifying a guanine. In some embodiments, the engineered guide RNA described herein comprises at least one chemically modified guanine. Exemplary chemically modified guanine can include inosine, 1-methyl-inosine, wyosine, methylwyosine, 4-demethyl-wyosine, isowyosine, wybutosine, peroxywybutosine, hydroxywybutosine, undemriodified hydroxywybutosine, 7-deaza-guanosine, queuosine, epoxyqueuosine, galactosyl-queuosine, mannosyl-queuosine, 7-cyano-7-deaza-guanosine, 7-aminomethyl-7-deaza-guanosine, archaeosine, 7-deaza-8-aza-guanosine, 6-thio-guanosine, 6-thio-7-deaza-guanosine, 6-thio-7-deaza-8-aza-guanosine, 7-methyl-guanosine, 6-thio-7-methyl-guanosine, 7-methyl-inosine, 6-methoxy-guanosine, 1-methyl-guanosine, N2-methyl-guanosine, N2, N2-dimethyl-guanosine, N2, 7-dimethyl-guanosine, N2, N2, 7-dimethyl-guanosine, 8-oxo-guanosine, 7-methyl-8-oxo-guanosine, 1-meththio-guanosine, N2-methyl-6-thio-guanosine, N2,N2-dimethyl-6-thio-guanosine, a-thio-guanosine, 2′-O-methyl-guanosine, N2-methyl-2′-O-methyl-guanosine, N2,N2-dimethyl-2′-O-methyl-guanosine, 1-methyl-2′-O-methyl-guanosine, N2, 7-dimethyl-2′-O-methyl-guanosine, 2′-O-methyl-inosine, 1, 2′-O-dimethyl-inosine, 6-O-phenyl-2′-deoxyinosine, 2′-O-ribosylguanosine, 1-thio-guanosine, 6-O-methyguanosine, O⁶-Methyl-2′-deoxyguanosine, 2′-F-ara-guanosine, and 2′-F-guanosine.

[0277] In some cases, the chemical modification of the engineered guide RNA can include introducing or substituting a nucleic acid analog or an unnatural nucleic acid into the engineered guide RNA. In some embodiments, nucleic acid analog can be any one of the chemically modified nucleic acid described herein. Exemplary nucleic acid analog can be found in PCT/US2021/034272, PCT/US2015/025175, PCT/US2014/050423, PCT/US2016/067353, PCT/US2018/041503, PCT/US18/041509, PCT/US2004/011786, or PCT/US2004/011833, all of which are expressly incorporated by reference in their entireties. The chemically modified nucleotide described herein can include a variant of guanosine, uridine, adenosine, thymidine, and cytosine, including any natively occurring or non-natively occurring guanosine, uridine, adenosine, thymidine or cytidine that has been altered chemically, for example by acetylation, methylation, hydroxylation. Exemplary chemically modified nucleotide can include 1-methyl-adenosine, 1-methyl-guanosine, 1-methyl-inosine, 2,2-dimethyl-guanosine, 2,6-diaminopurine, 2′-amino-2′-deoxyadenosine, 2′-amino-2′-deoxycytidine, 2′-amino-2′-deoxyguanosine, 2′-amino-2′-deoxyuridine, 2-amino-6-chloropurineriboside, 2-aminopurine-riboside, 2′-araadenosine, 2′-aracytidine, 2′-arauridine, 2′-azido-2′-deoxyadenosine, 2′-azido-2′-deoxycytidine, 2′-azido-2′-deoxyguanosine, 2′-azido-2′-deoxyuridine, 2-chloroadenosine, 2′-fluoro-2′-deoxyadenosine, 2′-fluoro-2′-deoxycytidine, 2′-fluoro-2′-deoxyguanosine, 2′-fluoro-2′-deoxyuridine, 2′-fluorothymidine, 2-methyl-adenosine, 2-methyl-guanosine, 2-methyl-thio-N6-isopenenyl-adenosine, 2′-O-methyl-2-aminoadenosine, 2′-O-methyl-2′-deoxyadenosine, 2′-O-methyl-2′-deoxycytidine, 2′-O-methyl-2′-deoxyguanosine, 2, —O-methyl-2′-deoxyuridine, 2′-O-methyl-5-methyluridine, 2′-O-methylinosine, 2′-O-methylpseudouridine, 2-thiocytidine, 2-thio-cytidine, 3-methyl-cytidine, 4-acetyl-cytidine, 4-thiouridine, 5-(carboxyhydroxymethyl)-uridine, 5,6-dihydrouridine, 5-aminoallylcytidine, 5-aminoallyl-deoxyuridine, 5-bromouridine, 5-carboxymethylaminomethyl-2-thio-uracil, 5-carboxymethylamonomethyl-uracil, 5-chloro-ara-cytosine, 5-fluoro-uridine, 5-iodouridine, 5-methoxycarbonylmethyl-uridine, 5-methoxy-uridine, 5-methyl-2-thio-uridine, 6-Azacytidine, 6-azauridine, 6-chloro-7-deaza-guanosine, 6-chloropurineriboside, 6-mercapto-guanosine, 6-methyl-mercaptopurine-riboside, 7-deaza-2′-deoxy-guanosine, 7-deazaadenosine, 7-methyl-guanosine, 8-azaadenosine, 8-bromo-adenosine, 8-bromo-guanosine, 8-mercapto-guanosine, 8-oxoguanosine, benzimidazole-riboside, beta-D-mannosyl-queosine, dihydro-uridine, inosine, N1-methyladenosine, N6-([6-ami nohexyl]carbamoylmethyl)-adenosine, N6-isopentenyl-adenosine, N6-methyl-adenosine, N7-methyl-xanthosine, N-uracil-5-oxyacetic acid methyl ester, puromycin, queosine, uracil-5-oxyacetic acid, uracil-5-oxyacetic acid methyl ester, wybutoxosine, xanthosine, and xylo-adenosine. In some embodiments, the chemically modified nucleic acid as described herein comprises at least one chemically modified nucleotide selected from 2-amino-6-chloropurineriboside-5′-triphosphate, 2-aminopurine-riboside-5′-triphosphate, 2-aminoadenosine-5′-triphosphate, 2′-amino-2′-deoxycytidine-triphosphate, 2-thiocytidine-5′-triphosphate, 2-thiouridine-5′-triphosphate, 2′-fluorothymidine-5′-triphosphate, 2′-O-methyl-inosine-5′-triphosphate, 4-thiouridine-5′-triphosphate, 5-aminoallylcytidine-5′-triphosphate, 5-aminoallyluridine-5′-triphosphate, 5-bromocytidine-5′-triphosphate, 5-bromouridine-5′-triphosphate, 5-bromo-2′-deoxycytidine-5′-triphosphate, 5-bromo-2′-deoxyuridine-5′-triphosphate, 5-iodocytidine-5′-triphosphate, 5-iodo-2′-deoxycytidine-5′-triphosphate, 5-iodouridine-5′-triphosphate, 5-iodo-2′-deoxyuridine-5′-triphosphate, 5-methylcytidine-5′-triphosphate, 5-methyluridine-5′-triphosphate, 5-propynyl-2′-deoxycytidine-5′-triphosphate, 5-propynyl-2′-deoxyuridine-5′-triphosphate, 6-azacytidine-5′-triphosphate, 6-azauridine-5′-triphosphate, 6-chloropurineriboside-5′-triphosphate, 7-deazaadenosine-5′-triphosphate, 7-deazaguanosine-5′-triphosphate, 8-azaadenosine-5′-triphosphate, 8-azidoadenosine-5′-triphosphate, benzimidazole-riboside-5′-triphosphate, N1-methyladenosine-5′-triphosphate, N1-methylguanosine-5′-triphosphate, N6-methyladenosine-5′-triphosphate, 6-methylguanosine-5′-triphosphate, pseudouridine-5′-triphosphate, puromycin-5′-triphosphate, or xanthosine-5′-triphosphate. In some embodiments, the chemically modified nucleic acid as described herein comprises at least one chemically modified nucleotide selected from pyridin-4-one ribonucleoside, 5-aza-uridine, 2-thio-5-aza-uridine, 2-thiouridine, 4-thio-pseudouridine, 2-thio-pseudouridine, 5-hydroxyuridine, 3-methyluridine, 5-carboxymethyl-uridine, 1-carboxymethyl-pseudouridine, 5-propynyl-uridine, 1-propynyl-pseudouridine, 5-taurinomethyluridine, 1-tauri nomethyl-pseudouridine, 5-taurinomethyl-2-thio-uridine, 1-taurinomethyl-4-thio-uridine, 5-methyl-uridine, 1-methyl-pseudouridine, 4-thio-1-methyl-pseudouridine, 2-thio-1-methyl-pseudouridine, 1-methyl-1-deaza-pseudouridine, 2-thio-1-methyl-1-deaza-pseudouridine, dihydrouridine, dihydropseudouridine, 2-thio-dihydrouridine, 2-thio-dihydropseudouridine, 2-methoxyuridine, 2-methoxy-4-thio-uridine, 4-methoxy-pseudouridine, and 4-methoxy-2-thio-pseudouridine. In some embodiments, the artificial nucleic acid as described herein comprises at least one chemically modified nucleotide selected from 5-aza-cytidine, pseudoisocytidine, 3-methyl-cytidine, N4-acetylcytidine, 5-formylcytidine, N4-methylcytidine, 5-hydroxymethylcytidine, 1-methyl-pseudoisocytidine, pyrrolo-cytidine, pyrrolo-pseudoisocytidine, 2-thio-cytidine, 2-thio-5-methyl-cytidine, 4-thio-pseudoisocytidine, 4-thio-1-methyl-pseudoisocytidine, 4-th io-1-methyl-1-deaza-pseudoisocytidine, 1-methyl-1-deaza-pseudoisocytidine, zebularine, 5-aza-zebularine, 5-methyl-zebularine, 5-aza-2-thio-zebularine, 2-thio-zebularine, 2-methoxy-cytidine, 2-methoxy-5-methyl-cytidine, 4-methoxy-pseudoisocytidine, and 4-methoxy-1-methyl-pseudoisocytidine. In some embodiments, the chemically modified nucleic acid as described herein comprises at least one chemically modified nucleotide selected from 2-aminopurine, 2, 6-diaminopurine, 7-deaza-adenine, 7-deaza-8-aza-adenine, 7-deaza-2-aminopurine, 7-deaza-8-aza-2-aminopurine, 7-deaza-2, 6-diaminopurine, 7-deaza-8-aza-2, 6-diaminopurine, 1-methyladenosine, N6-methyladenosine, N6-isopentenyladenosine, N6-(cis-hydroxyisopentenyl)adenosine, 2-methylthio-N6-(cis-hydroxyisopentenyl) adenosine, N6-glycinylcarbamoyladenosine, N6-threonylcarbamoyladenosine, 2-methylthio-N6-threonyl carbamoyladenosine, N6,N6-dimethyladenosine, 7-methyladenine, 2-methylthio-adenine, and 2-methoxy-adenine. In other embodiments, the chemically modified nucleic acid as described herein comprises at least one chemically modified nucleotide selected from inosine, 1-methyl-inosine, wyosine, wybutosine, 7-deaza-guanosine, 7-deaza-8-aza-guanosine, 6-thio-guanosine, 6-thio-7-deaza-guanosine, 6-thio-7-deaza-8-aza-guanosine, 7-methyl-guanosine, 6-thio-7-methyl-guanosine, 7-methylinosine, 6-methoxy-guanosine, 1-methylguanosine, N2-methylguanosine, N2,N2-dimethylguanosine, 8-oxo-guanosine, 7-methyl-8-oxo-guanosine, 1-methyl-6-thio-guanosine, N2-methyl-6-thio-guanosine, and N2,N2-dimethyl-6-thio-guanosine. In certain embodiments, the chemically modified nucleic acid as described herein comprises at least one chemically modified nucleotide selected from 6-aza-cytidine, 2-thio-cytidine, alpha-thio-cytidine, pseudo-iso-cytidine, 5-aminoallyl-uridine, 5-iodo-uridine, N1-methyl-pseudouridine, 5,6-dihydrouridine, alpha-thio-uridine, 4-thio-uridine, 6-aza-uridine, 5-hydroxy-uridine, deoxy-thymidine, 5-methyl-uridine, pyrrolo-cytidine, inosine, alpha-thio-guanosine, 6-methyl-guanosine, 5-methyl-cytdine, 8-oxo-guanosine, 7-deaza-guanosine, N1-methyl-adenosine, 2-amino-6-chloro-purine, N6-methyl-2-amino-purine, pseudo-iso-cytidine, 6-chloro-purine, N6-methyl-adenosine, alpha-thio-adenosine, 8-azido-adenosine, 7-deaza-adenosine.

[0278] A modified base of a unnatural nucleic acid includes, but may be not limited to, uracil-5-yl, hypoxanthin-9-yl (I), 2-aminoadenin-9-yl, 5-methylcytosine (5-me-C), 5-hydroxymethyl cytosine, xanthine, hypoxanthine, 2-aminoadenine, 6-methyl and other alkyl derivatives of adenine and guanine, 2-propyl and other alkyl derivatives of adenine and guanine, 2-thiouracil, 2-thiothymine and 2-thiocytosine, 5-halouracil and cytosine, 5-propynyl uracil and cytosine, 6-azo uracil, cytosine and thymine, 5-uracil (pseudouracil), 4-thiouracil, 8-halo, 8-amino, 8-thiol, 8-thioalkyl, 8-hydroxyl and other 8-substituted adenines and guanines, 5-halo particularly 5-bromo, 5-trifluoromethyl and other 5-substituted uracils and cytosines, 7-methylguanine and 7-methyladenine, 8-azaguanine and 8-azaadenine, 7-deazaguanine and 7-deazaadenine and 3-deazaguanine and 3-deazaadenine. Certain unnatural nucleic acids, such as 5-substituted pyrimidines, 6-azapyrimidines and N-2 substituted purines, N-6 substituted purines, 0-6 substituted purines, 2-aminopropyladenine, 5-propynyluracil, 5-propynylcytosine, 5-methylcytosine, those that increase the stability of duplex formation, universal nucleic acids, hydrophobic nucleic acids, promiscuous nucleic acids, size-expanded nucleic acids, fluorinated nucleic acids, 5-substituted pyrimidines, 6-azapyrimidines and N-2, N-6 and 0-6 substituted purines, including 2-aminopropyladenine, 5-propynyluracil and 5-propynylcytosine, 5-methylcytosine (5-me-C), 5-hydroxymethyl cytosine, xanthine, hypoxanthine, 2-aminoadenine, 6-methyl, other alkyl derivatives of adenine and guanine, 2-propyl and other alkyl derivatives of adenine and guanine, 2-thiouracil, 2-thiothymine and 2-thiocytosine, 5-halouracil, 5-halocytosine, 5-propynyl (—C≡C—CH₃) uracil, 5-propynyl cytosine, other alkynyl derivatives of pyrimidine nucleic acids, 6-azo uracil, 6-azo cytosine, 6-azo thymine, 5-uracil (pseudouracil), 4-thiouracil, 8-halo, 8-amino, 8-thiol, 8-thioalkyl, 8-hydroxyl and other 8-substituted adenines and guanines, 5-halo particularly 5-bromo, 5-trifluoromethyl, other 5-substituted uracils and cytosines, 7-methylguanine, 7-methyladenine, 2-F-adenine, 2-amino-adenine, 8-azaguanine, 8-azaadenine, 7-deazaguanine, 7-deazaadenine, 3-deazaguanine, 3-deazaadenine, tricyclic pyrimidines, phenoxazine cytidine([5,4-b][1,4]benzoxazin-2(3H)-one), phenothiazine cytidine (1H-pyrimido[5,4-b][1,4]benzothiazin-2(3H)-one), G-clamps, phenoxazine cytidine (e.g. 9-(2-aminoethoxy)-H-pyrimido[5,4-b][1,4]benzoxazin-2(3H)-one), carbazole cytidine (2H-pyrimido[4,5-b]indol-2-one), pyridoindole cytidine (H-pyrido[3′,2′:4,5]pyrrolo[2,3-d]pyrimidin-2-one), those in which the purine or pyrimidine base may be replaced with other heterocycles, 7-deaza-adenine, 7-deazaguanosine, 2-aminopyridine, 2-pyridone, azacytosine, 5-bromocytosine, bromouracil, 5-chlorocytosine, chlorinated cytosine, cyclocytosine, cytosine arabinoside, 5-fluorocytosine, fluoropyrimidine, fluorouracil, 5,6-dihydrocytosine, 5-iodocytosine, hydroxyurea, iodouracil, 5-nitrocytosine, 5-bromouracil, 5-chlorouracil, 5-fluorouracil, and 5-iodouracil, 2-amino-adenine, 6-thio-guanine, 2-thio-thymine, 4-thio-thymine, 5-propynyl-uracil, 4-thio-uracil, N4-ethylcytosine, 7-deazaguanine, 7-deaza-8-azaguanine, 5-hydroxycytosine, 2′-deoxyuridine, or 2-amino-2′-deoxyadenosine.

[0279] In some cases, the at least one chemical modification can comprise chemically modifying the 5′ or 3′ end such as 5′ cap or 3′ tail of the engineered guide RNA. In some embodiments, the engineered guide RNA can comprise a chemical modification comprising 3′ nucleotides which can be stabilized against degradation, e.g., by incorporating one or more of the modified nucleotides described herein. In this embodiment, uridines can be replaced with modified uridines, e.g., 5-(2-amino) propyl uridine, and 5-bromo uridine, or with any of the modified uridines described herein; adenosines and guanosines can be replaced with modified adenosines and guanosines, e.g., with modifications at the 8-position, e.g., 8-bromo guanosine, or with any of the modified adenosines or guanosines described herein. In some embodiments, deaza nucleotides, e.g., 7-deaza-adenosine, can be incorporated into the gRNA. In some embodiments, O- and N-alkylated nucleotides, e.g., N6-methyladenosine, can be incorporated into the gRNA. In some embodiments, sugar-modified ribonucleotides can be incorporated, e.g., wherein the 2′ OH-group may be replaced by a group selected from H,—OR,—R (wherein R can be, e.g., alkyl, cycloalkyl, aryl, aralkyl, heteroaryl or sugar), halo,—SH,—SR (wherein R can be, e.g., alkyl, cycloalkyl, aryl, aralkyl, heteroaryl or sugar), amino (wherein amino can be, e.g., NH₂; alkylamino, dialkylamino, heterocyclyl, arylamino, diarylamino, heteroarylamino, diheteroarylamino, or amino acid); or cyano (—CN). In some embodiments, the phosphate backbone can be modified as described herein, e.g., with a phosphothioate group. In some embodiments, the nucleotides in the overhang region of the gRNA can each independently be a modified or unmodified nucleotide including, but not limited to 2′-sugar modified, such as, 2-F 2′-O-methyl, thymidine (T), 2′-O-methoxyethyl-5-methyluridine (Teo), 2′-O-methoxyethyladenosine (Aeo), 2′-O-methoxyethyl-5-methylcytidine (m5Ceo), or any combinations thereof.

### Delivery

[0280] An engineered guide RNA described herein (e.g., a guide RNA comprising a barbell macro-footprint sequence and at least some elements of a micro-footprint sequence) or a polynucleotide encoding the same can be delivered via a delivery vehicle.

[0281] An engineered polynucleotide of the present disclosure (e.g., an engineered polynucleotide encoding for an engineered guide RNA comprising a barbell macro-footprint sequence and at least some elements of a micro-footprint sequence) can be delivered via a delivery vehicle. In some embodiments, the delivery vehicle is a vector. A vector can facilitate delivery of the engineered polynucleotide into a cell to genetically modify the cell. In some examples, the vector comprises DNA, such as double stranded or single stranded DNA. In some examples, the delivery vector can be a eukaryotic vector, a prokaryotic vector (e.g., a bacterial vector or plasmid), a viral vector, or any combination thereof. In some embodiments, the vector is an expression cassette. In some embodiments, a viral vector comprises a viral capsid, an inverted terminal repeat sequence, and the engineered polynucleotide can be used to deliver the engineered guide RNA to a cell.

[0282] In some embodiments, the viral vector can be a retroviral vector, an adenoviral vector, an adeno-associated viral (AAV) vector, an alphavirus vector, a lentivirus vector (e.g., human or porcine), a Herpes virus vector, an Epstein-Barr virus vector, an SV40 virus vectors, a pox virus vector, or a combination thereof. In some embodiments, the viral vector can be a recombinant vector, a hybrid vector, a chimeric vector, a self-complementary vector, a single-stranded vector, or any combination thereof.

[0283] In some embodiments, the viral vector can be an adeno-associated virus (AAV). In some embodiments, the AAV can be any AAV known in the art. In some embodiments, the viral vector can be of a specific serotype. In some embodiments, the viral vector can be an AAV1 serotype, AAV2 serotype, AAV3 serotype, AAV4 serotype, AAV5 serotype, AAV6 serotype, AAV7 serotype, AAV8 serotype, AAV9 serotype, AAV10 serotype, AAV11 serotype, AAV 12 serotype, AAV13 serotype, AAV14 serotype, AAV15 serotype, AAV16 serotype, AAV.rh8 serotype, AAV.rh10 serotype, AAV.rh20 serotype, AAV.rh39 serotype, AAV.Rh74 serotype, AAV.RHM4-1 serotype, AAV.hu37 serotype, AAV.Anc80 serotype, AAV.Anc80L65 serotype, AAV.7m8 serotype, AAV.PHP.B serotype, AAV2.5 serotype, AAV2tYF serotype, AAV3B serotype, AAV.LK03 serotype, AAV.HSC1 serotype, AAV.HSC2 serotype, AAV.HSC3 serotype, AAV.HSC4 serotype, AAV.HSC5 serotype, AAV.HSC6 serotype, AAV.HSC7 serotype, AAV.HSC8 serotype, AAV.HSC9 serotype, AAV.HSC10 serotype, AAV.HSC11 serotype, AAV.HSC12 serotype, AAV.HSC13 serotype, AAV.HSC14 serotype, AAV.HSC15 serotype, AAV.HSC16 serotype, and AAVhu68 serotype, a derivative of any of these serotypes, or any combination thereof.

[0284] In some embodiments, the AAV vector can be a recombinant vector, a hybrid AAV vector, a chimeric AAV vector, a self-complementary AAV (scAAV) vector, a single-stranded AAV, or any combination thereof.

[0285] In some embodiments, the AAV vector can be a recombinant AAV (rAAV) vector. Methods of producing recombinant AAV vectors can be known in the art and generally involve, in some cases, introducing into a producer cell line: (1) DNA necessary for AAV replication and synthesis of an AAV capsid, (b) one or more helper constructs comprising the viral functions missing from the AAV vector, (c) a helper virus, and (d) the plasmid construct containing the genome of the AAV vector, e.g., ITRs, promoter and engineered guide RNA sequences, etc. In some examples, the viral vectors described herein can be engineered through synthetic or other suitable means by references to published sequences, such as those that can be available in the literature. For example, the genomic and protein sequences of various serotypes of AAV, as well as the sequences of the native terminal repeats (TRs), Rep proteins, and capsid subunits can be known in the art and can be found in the literature or in public databases such as GenBank or Protein Data Bank (PDB).

[0286] In some examples, methods of producing delivery vectors herein comprising packaging an engineered polynucleotide of the present disclosure (e.g., an engineered polynucleotide encoding for an engineered guide RNA comprising a barbell macro-footprint sequence and at least some elements of a micro-footprint sequence) in an AAV vector. In some examples, methods of producing the delivery vectors described herein comprise, (a) introducing into a cell: (i) a polynucleotide comprising a promoter and an engineered guide RNA payload disclosed herein; and (ii) a viral genome comprising a Replication (Rep) gene and Capsid (Cap) gene that encodes a wild-type AAV capsid protein or modified version thereof; (b) expressing in the cell the wild-type AAV capsid protein or modified version thereof; (c) assembling an AAV particle; and (d) packaging the payload disclosed herein in the AAV particle, thereby generating an AAV delivery vector. In some examples, the recombinant vectors comprise one or more inverted terminal repeats and the inverted terminal repeats comprise a 5′ inverted terminal repeat, a 3′ inverted terminal repeat, and a mutated inverted terminal repeat. In some examples, the mutated terminal repeat lacks a terminal resolution site, thereby enabling formation of a self-complementary AAV.

[0287] In some examples, a hybrid AAV vector can be produced by transcapsidation, e.g., packaging an inverted terminal repeat (ITR) from a first serotype into a capsid of a second serotype, wherein the first and second serotypes may not be the same. In some examples, the Rep gene and ITR from a first AAV serotype (e.g., AAV2) can be used in a capsid from a second AAV serotype (e.g., AAV5 or AAV9), wherein the first and second AAV serotypes may not be the same. As a non-limiting example, a hybrid AAV serotype comprising the AAV2 ITRs and AAV9 capsid protein can be indicated AAV2/9. In some examples, the hybrid AAV delivery vector comprises an AAV2/1, AAV2/2, AAV 2/4, AAV2/5, AAV2/8, or AAV2/9 vector.

[0288] In some examples, the AAV vector can be a chimeric AAV vector. In some examples, the chimeric AAV vector comprises an exogenous amino acid or an amino acid substitution, or capsid proteins from two or more serotypes. In some examples, a chimeric AAV vector can be genetically engineered to increase transduction efficiency, selectivity, or a combination thereof.

[0289] In some examples, the AAV vector comprises a self-complementary AAV genome. Self-complementary AAV genomes can be generally known in the art and contain both DNA strands which can anneal together to form double-stranded DNA.

[0290] In some examples, the delivery vector can be a retroviral vector. In some examples, the retroviral vector can be a Moloney Murine Leukemia Virus vector, a spleen necrosis virus vector, or a vector derived from the Rous Sarcoma Virus, Harvey Sarcoma Virus, avian leukosis virus, human immunodeficiency virus, myeloproliferative sarcoma virus, or mammary tumor virus, or a combination thereof. In some examples, the retroviral vector can be transfected such that the majority of sequences coding for the structural genes of the virus (e.g., gag, pol, and env) can be deleted and replaced by the gene(s) of interest.

[0291] In some examples, the delivery vehicle can be a non-viral vector. In some examples, the delivery vehicle can be a plasmid. In some embodiments, the plasmid comprises DNA. In some examples, the plasmid comprises circular double-stranded DNA. In some examples, the plasmid can be linear. In some examples, the plasmid comprises one or more genes of interest and one or more regulatory elements. In some examples, the plasmid comprises a bacterial backbone containing an origin of replication and an antibiotic resistance gene or other selectable marker for plasmid amplification in bacteria. In some examples, the plasmid can be a minicircle plasmid. In some examples, the plasmid contains one or more genes that provide a selective marker to induce a target cell to retain the plasmid. In some examples, the plasmid can be formulated for delivery through injection by a needle carrying syringe. In some examples, the plasmid can be formulated for delivery via electroporation. In some examples, the plasmids can be engineered through synthetic or other suitable means known in the art. For example, in some cases, the genetic elements can be assembled by restriction digest of the desired genetic sequence from a donor plasmid or organism to produce ends of the DNA which can then be readily ligated to another genetic sequence.

[0292] In some embodiments, the vector containing the engineered polynucleotide is a non-viral vector system. In some embodiments, the non-viral vector system comprises cationic lipids, or polymers. For example, the non-viral vector system comprises can be a liposome or polymeric nanoparticle. In some embodiments, the engineered polynucleotide or a non-viral vector comprising the engineered polynucleotide is delivered to a cell by hydrodynamic injection or ultrasound.

### Methods of Treatment

[0293] Disclosed herein are methods of delivering an engineered guide RNA disclosed herein (e.g., an engineered guide RNA comprising a barbell macro-footprint sequence and at least some elements of a micro-footprint sequence), or a vector encoding an engineered guide RNA disclosed herein, to a cell or to a subject in need thereof. The engineered guide RNA described here, upon hybridization to a target RNA forms a guide-target RNA scaffold, where the engineered guide RNA comprises a barbell macro-footprint sequence and at least some elements of a micro-footprint sequence. An engineered guide RNA described here can hybridize to a target RNA that is associated with or implicated in a disease or condition, which can cause, or partially cause, or contribute to one or more symptoms of the associated disease or condition or can be associated with or implicated in a pathway that manifests in the disease or condition. In some embodiments, engineered guide RNAs of the disclosure comprising a barbell macro-footprint sequence and at least some elements of a micro-footprint sequence can be used to treat a disease or condition. The disease or condition can be selected from the group consisting of: a neurodegenerative disease or disorder, a muscular disease or disorder, a metabolic disease or disorder, an ocular disease or disorder, a liver disease or disorder, a cancer, and any combination thereof. In some aspects, the disease or condition can be selected from the group consisting of: Rett syndrome, Huntington's disease, Parkinson's disease, Alzheimer's disease, a muscular dystrophy, Tay-Sachs disease, and any combination thereof.

[0294] In some embodiments, the described engineered guide RNAs of the disclosure comprising a barbell macro-footprint sequence and at least some elements of a micro-footprint sequence can hybridize to target RNAs to form guide-target RNA scaffolds, where the target RNA can be selected from the group consisting of: ABCA4, ALAS1, APP, ATP7B, CFTR, DMD, DMPK, DUX4, GAPDH, GBA, HEXA, HFE, LIPA, LRRK2, MAPT, PCSK9 start site, PINK1, PMP22, SERPINA1, SCNN1A start site, SNCA, or SOD1, a fragment of any one of these, and any combination thereof. In some embodiments, the engineered guide RNAs of the disclosure comprising a barbell macro-footprint sequence and at least some elements of a micro-footprint sequence, where the engineered guide RNAs target any gene of interest in need of editing, and compositions comprising such engineered guide RNAs of the disclosure, can be useful in treating diseases or conditions associated with any of the target RNAs of interest.

[0295] Other embodiments of the disclosure can provide for a method of treating a disease or condition in a subject, the method comprising: administering to the subject an effective amount of any of the disclosed engineered guide RNAs comprising a barbell macro-footprint sequence and at least some elements of a micro-footprint sequence, to treat the disease or condition in the subject in need thereof. In some examples, a method of treating a disease or condition in a subject is provided, where the method comprises administering to the subject an effective amount of any of the disclosed polynucleotides encoding any of the engineered guide RNAs of the disclosure comprising a barbell macro-footprint sequence and at least some elements of a micro-footprint sequence, to treat the disease or condition in the subject in need thereof. Further aspects provide for a method of treating a disease or condition in a subject, where the method comprises: administering to the subject an effective amount of any of the disclosed delivery vehicles comprising engineered guide RNAs comprising a barbell macro-footprint sequence and at least some elements of a micro-footprint sequence, to treat the disease or condition in the subject in need thereof. Some examples provide methods of treating a disease or condition in a subject comprising administering to the subject, an effective amount of any of the disclosed delivery vehicles comprising polynucleotides encoding engineered guide RNAs described here comprising a barbell macro-footprint sequence and at least some elements of a micro-footprint sequence, to treat the disease or condition in the subject in need thereof. In further aspects provided here are methods of treating a disease or condition in a subject, where the method comprises: administering to the subject an effective amount of any of the disclosed pharmaceutical compositions comprising engineered guide RNAs comprising a barbell macro-footprint sequence and at least some elements of a micro-footprint sequence, to treat the disease or condition in the subject in need thereof. Some embodiments provide methods of treating a disease or condition in a subject, where the method comprises: administering to the subject an effective amount of any of the disclosed pharmaceutical compositions comprising polynucleotides encoding engineered guide RNAs comprising a barbell macro-footprint sequence and at least some elements of a micro-footprint sequence, to treat the disease or condition in the subject in need thereof. In further examples, methods of treating a disease or condition in a subject comprising administering to the subject, an effective amount of any of the disclosed pharmaceutical compositions comprising delivery vehicles comprising any of the described engineered guide RNAs comprising a barbell macro-footprint sequence and at least some elements of a micro-footprint sequence or polynucleotides encoding engineered guide RNAs disclosed here, to treat the disease or condition in the subject in need thereof.

[0296] In some aspects, provided here are uses of any of the described engineered guide RNAs comprising a barbell macro-footprint sequence and at least some elements of a micro-footprint sequence for the preparation of a medicament for the treatment of any of the diseases or conditions disclosed here. Some embodiments provide uses of any of the described polynucleotides encoding any of the engineered guide RNAs comprising a barbell macro-footprint sequence and at least some elements of a micro-footprint sequence for the preparation of a medicament for the treatment of any of the diseases or conditions disclosed here. In other examples, provided here are uses of any of the described delivery vehicles containing engineered guide RNAs comprising a barbell macro-footprint sequence and at least some elements of a micro-footprint sequence for the preparation of a medicament for the treatment of any of the diseases or conditions disclosed here. Further aspects provide uses of any of the described delivery vehicles containing polynucleotides encoding engineered guide RNAs comprising a barbell macro-footprint sequence and at least some elements of a micro-footprint sequence described here for the preparation of a medicament for the treatment of any of the diseases or conditions disclosed here. In some examples, provided here are uses of any of the described pharmaceutical compositions comprising any of the engineered guide RNAs comprising a barbell macro-footprint sequence and at least some elements of a micro-footprint sequence for the preparation of a medicament for the treatment of any of the diseases or conditions disclosed here. Additional examples provide uses of any of the described pharmaceutical compositions polynucleotides encoding engineered guide RNAs comprising a barbell macro-footprint sequence and at least some elements of a micro-footprint sequence for the preparation of a medicament for the treatment of any of the diseases or conditions disclosed here. In other aspects, provided here are uses of any of the described pharmaceutical compositions comprising delivery vehicles comprising engineered guide RNAs comprising a barbell macro-footprint sequence and at least some elements of a micro-footprint sequence or polynucleotides encoding engineered guide RNAs described here for the preparation of a medicament for the treatment of any of the diseases or conditions disclosed here.

[0297] Other embodiments can provide any of the described engineered guide RNAs comprising a barbell macro-footprint sequence and at least some elements of a micro-footprint sequence for use in treating any of the disclosed diseases or conditions. In some aspects, any of the described polynucleotides encoding engineered guide RNAs of the disclosure comprising a barbell macro-footprint sequence and at least some elements of a micro-footprint sequence, can be used in treating any of the diseases or conditions disclosed here. Additional examples provide any of the described delivery vehicles comprising engineered guide RNAs of the disclosure comprising a barbell macro-footprint sequence and at least some elements of a micro-footprint sequence or polynucleotides encoding any of the engineered guide RNAs described here, for use in treating any of the disclosed diseases or conditions. In some embodiments, provided here are pharmaceutical compositions comprising engineered guide RNAs of the disclosure comprising a barbell macro-footprint sequence and at least some elements of a micro-footprint sequence, for use in treating any of the diseases or conditions disclosed here. Other aspects provide pharmaceutical compositions disclosed here comprising polynucleotides encoding engineered guide RNAs of the disclosure comprising a barbell macro-footprint sequence and at least some elements of a micro-footprint sequence, for use in treating any of the disclosed diseases or conditions. In further examples, provided here are pharmaceutical compositions of the disclosure comprising any of the delivery vehicles comprising any of the described engineered guide RNAs comprising a barbell macro-footprint sequence and at least some elements of a micro-footprint or any of the described polynucleotides encoding any of the engineered guide RNAs described here, for use in treating any of the disclosed diseases or conditions. in a subject.

[0298] Engineered guide RNA medicaments described here can be used to treat a disease or condition in a subject in need thereof. Other examples of the disclosure provide for any of the described engineered guide RNAs comprising a barbell macro-footprint sequence and at least some elements of a micro-footprint sequence for use in a treatment of a disease or condition in a subject described here. In some embodiments, the uses and methods disclosed here can be directed to treating a disease or condition, which can also include preventing a disease or condition, one or more symptoms of the disease or condition, a pathway or component of a pathway that manifests in the disease or condition, or any combination thereof. In other embodiments, the uses and methods disclosed here can treat a disease or condition, which can also include treating a disease or condition, one or more symptoms of the disease or condition, a pathway or component of a pathway that manifests in the disease or condition, or any combination thereof. In some embodiments, any of the uses and methods described here can be for treating (including preventing, ameliorating) a disease or condition selected from the group consisting of: a neurodegenerative disease or disorder, a muscular disease or disorder, a metabolic disease or disorder, an ocular disease or disorder, a liver disease or disorder, a cancer, and any combination thereof. Other diseases or conditions of the disclosure can be selected from the group consisting of: Duchenne's Muscular Dystrophy (DMD), Becker muscular dystrophy, myotonic dystrophy, Facioscapulohumeral muscular dystrophy, Rett's syndrome, Charcot-Marie-Tooth disease, Alzheimer's disease, a tauopathy, Parkinson's disease, alpha-1 antitrypsin deficiency, cystic fibrosis-like disease, Wilson disease, Stargardt disease, and any combination thereof.

[0299] In some methods of the disclosure for treatment of a disease or condition with the disclosed engineered guide RNAs comprising a barbell macro-footprint sequence and at least some elements of a micro-footprint sequence of the description, the disease or condition can be associated with a mutation in a gene, or RNA encoded by the gene, or the mutation is introduced into a gene. Other examples provide methods of the disclosure for treatment of a disease or condition with any of the described polynucleotides encoding engineered guide RNAs of the description, where the disease or condition can be associated with a mutation in a gene, or RNA encoded by the gene, or the mutation is introduced into a gene. In further aspects, methods of the disclosure for treatment of a disease or condition with the disclosed delivery vehicles comprising any of the engineered guide RNAs comprising a barbell macro-footprint sequence and at least some elements of a micro-footprint sequence of the description or polynucleotides encoding the engineered guide RNAs, where the disease or condition can be associated with a mutation in a gene, or RNA encoded by the gene, or the mutation is introduced into a gene. Some embodiments provide methods of the disclosure for treatment of a disease or condition with any of the described pharmaceutical compositions comprising engineered guide RNAs comprising a barbell macro-footprint sequence and at least some elements of a micro-footprint sequence of the description, where the disease or condition can be associated with a mutation in a gene, or RNA encoded by the gene, or the mutation is introduced into a gene. Other aspects provide methods for treatment of a disease or condition with any of the described pharmaceutical compositions comprising any of the polynucleotides encoding engineered guide RNAs of the disclosure, where the disease or condition can be associated with a mutation in a gene, or RNA encoded by the gene, or the mutation is introduced into a gene. Further examples provide methods for treatment of a disease or condition with any of the described pharmaceutical compositions comprising any of the disclosed delivery vehicles described here comprising any of the engineered guide RNAs of the disclosure, where the disease or condition can be associated with a mutation in a gene, or RNA encoded by the gene, or the mutation is introduced into a gene. Yet other embodiments provide methods for treatment of a disease or condition with any of the described pharmaceutical compositions comprising any of the disclosed delivery vehicles described here comprising any of the polynucleotides encoding any of the engineered guide RNAs of the disclosure, where the disease or condition can be associated with a mutation in a gene, or RNA encoded by the gene, or the mutation is introduced into a gene. Additional aspects provide a gene selected from the group consisting of: ABCA4, ALAS1, APP, ATP7B, ATP7B G1226R, CFTR, DMD, DMPK, DUX4, GAPDH, GBA, HEXA, HFE, HFE C282Y, LIPA, LIPA c.894 G>A, LRRK2, MAPT, PCSK9 start site, PINK1, PMP22, SERPINA1, SERPINA1 E342K, SCNN1A start site, SNCA, SOD1, a fragment of any of these, and any combination thereof. In some embodiments, an engineered guide RNA of the present disclosure comprising a barbell macro-footprint can target an IDUA mRNA. In some embodiments, an engineered guide RNA of the present disclosure comprising a barbell macro-footprint may not target an IDUA mRNA.

[0300] In various embodiments described here, engineered guide RNAs of the disclosure comprising a barbell macro-footprint sequence and at least some elements of a micro-footprint sequence can be useful as therapeutics for treating subjects suffering from a disease or condition, where the subject can have a target RNA comprising a mutation or a target RNA in need of a mutation. Some examples described here are directed to polynucleotides encoding engineered guide RNAs of the disclosure comprising a barbell macro-footprint sequence and at least some elements of a micro-footprint sequence that can be useful as therapeutics for treating subjects suffering from a disease or condition, where the subject can have a target RNA comprising a mutation or a target RNA in need of a mutation. In other aspects described here, any of the described delivery vehicles comprising engineered guide RNAs of the disclosure comprising a barbell macro-footprint sequence and at least some elements of a micro-footprint sequence can be useful as therapeutics for treating subjects suffering from a disease or condition, where the subject can have a target RNA comprising a mutation or a target RNA in need of a mutation. Further embodiments described here are directed to delivery vehicles comprising polynucleotides encoding any of the engineered guide RNAs of the disclosure comprising a barbell macro-footprint sequence and at least some elements of a micro-footprint sequence that can be useful as therapeutics for treating subjects suffering from a disease or condition, where the subject can have a target RNA comprising a mutation or a target RNA in need of a mutation. In some examples described here, any of the described pharmaceutical compositions comprising engineered guide RNAs of the disclosure comprising a barbell macro-footprint sequence and at least some elements of a micro-footprint sequence can be useful as therapeutics for treating subjects suffering from a disease or condition, where the subject can have a target RNA comprising a mutation or a target RNA in need of a mutation. Additional aspects described here are directed to pharmaceutical compositions comprising delivery vehicles with any of the disclosed engineered guide RNAs or polynucleotides encoding engineered guide RNAs of the disclosure comprising a barbell macro-footprint sequence and at least some elements of a micro-footprint sequence that can be useful as therapeutics for treating subjects suffering from a disease or condition, where the subject can have a target RNA comprising a mutation or a target RNA in need of a mutation.

[0301] Further embodiments provide a therapeutic comprising any of the disclosed engineered guide RNAs comprising a barbell macro-footprint sequence and at least some elements of a micro-footprint sequence or any of the described polynucleotides encoding any of the disclosed engineered guide RNAs. In other aspects, a therapeutic described here comprises a delivery vehicle comprising any of the disclosed engineered guide RNAs comprising a barbell macro-footprint sequence and at least some elements of a micro-footprint sequence or any of the described polynucleotides encoding any of the disclosed engineered guide RNAs. Additional embodiments provide a therapeutic comprising a pharmaceutical composition comprising any of the disclosed engineered guide RNAs comprising a barbell macro-footprint sequence and at least some elements of a micro-footprint sequence, any of the described polynucleotides encoding any of the disclosed engineered guide RNAs, or any of the described delivery vehicles. In some examples of the disclosure, a method of treating (including preventing, reducing, or ameliorating) a subject suffering from a disease or a condition or symptoms of the disease or the condition, comprises administering to the subject, a therapeutic that facilitates editing of a target RNA. In some embodiments, editing the target RNA can facilitate correction of a mutation. The mutation can be a missense mutation or a nonsense mutation. In some embodiments, the RNA editing can involve introducing mutations into a target RNA of interest. In some embodiments, the engineered guide RNAs of the present disclosure can facilitate multiple RNA edits of a target RNA.

[0302] In some embodiments of the disclosure, target RNAs of the guide-target RNA scaffold formed upon hybridization of an engineered guide RNA described here and a target RNA, can have a mutation, or a mutation can be introduced into the target RNAs using the engineered guide RNAs of the disclosure.

[0303] ABCA4. Some examples provide engineered RNAs of the disclosure comprising a barbell macro-footprint sequence and at least some elements of a micro-footprint, which can comprise a targeting sequence with target complementarity to a target RNA that is an ATP binding cassette subfamily A member 4 (ABCA4). In some embodiments of the disclosure, the therapeutics or engineered guide RNAs described here comprising a barbell macro-footprint sequence and at least some elements of a micro-footprint sequence, can facilitate RNA editing of an ABCA4 target RNA, which can have a mutation selected from the group consisting of: G6320A; G5714A; G5882A; and any combination thereof. The engineered guide RNAs described here comprising a barbell macro-footprint sequence and at least some elements of a micro-footprint sequence can facilitate a correction of the G to A mutations of the ABCA4 gene. In some examples, the ABCA4 mutation causes or contributes to macular degeneration in a subject in need thereof to whom the described engineered guide RNA can be administered for treatment. In some examples, the macular degeneration can be Stargardt macular degeneration. In some embodiments, the human subject can be at risk of developing or has developed Stargardt macular degeneration (or Stargardt disease), which could be caused, at least in part, by one of the indicated mutations of ABCA4. Some embodiments of the disclosure provide for engineered guide RNAs comprising a barbell macro-footprint sequence and at least some elements of a micro-footprint sequence, for facilitating editing thereby correcting the mutation in ABCA4 and reducing the incidence of Stargardt disease in the subject. In some examples the target RNA molecule comprises an adenosine with a 5′ G. In some examples, the adenosine with the 5′ G can be the base intended for chemical modification by the RNA editing entity. In some examples, the RNA editing entity can be an ADAR, and the ADAR chemically modifies the adenosine with the 5′ G after recruitment by the guide-target RNA scaffold. Accordingly, such engineered guide RNAs can be used in methods of treating a subject suffering from Stargardt macular degeneration.

[0304] A guide RNA targeting ABCA4 can comprise a first and second internal loop positioned with respect to the base that is most proximal to the A/C mismatch in the guide-target RNA complex. In some embodiments, the first internal loop is positioned from about 5 bases away from the A/C mismatch to about 15 bases away from the A/C mismatch with respect to the base of the first internal loop that is most proximal to the A/C mismatch. In some embodiments, the first internal loop is positioned 15 bases away from the A/C mismatch with respect to the base of the first internal loop that is most proximal to the A/C mismatch. In some embodiments, the second internal loop is positioned from about 12 bases away from the A/C mismatch to about 40 bases away from the A/C mismatch with respect to the base of the second internal loop that is most proximal to the A/C mismatch. In some embodiments, the second internal loop is positioned 33 bases away from the A/C mismatch with respect to the base of the second internal loop that is most proximal to the A/C mismatch.

[0305] An engineered guide RNA targeting ABCA4 can comprise a polynucleotide sequence with at least 80%, 85%, 90%, 92%, 95%, 97%, or 99% sequence identity to any one of SEQ ID NO: 1-105, 2729-2761, or 2772-2843.

[0306] APP. Other examples of the disclosure can be directed to engineered guide RNAs comprising a barbell macro-footprint sequence and at least some elements of a micro-footprint sequence, where the engineered guide RNAs hybridize to target RNA that is amyloid precursor protein (APP), which can be targeted for editing. In some embodiments, a specific residue can be targeted utilizing the engineered guide RNAs comprising a barbell macro-footprint sequence and at least some elements of a micro-footprint sequence and methods described here. In some examples, the engineered guide RNAs described here are configured to facilitate an edit of a base of a nucleotide of the target RNA by an RNA editing entity forming an edited target RNA, such that a protein translated from the edited target RNA comprises at least one alteration or mutation selected from the group consisting of: K670E, K670R, K670G, M671V, A673V, A673T, D672G, E682G, H684R, K687R, K687E, K687G, I712X, T714X, and any combination thereof. In some embodiments of the disclosure, the target RNA encodes for an unmodified APP polypeptide that comprises at least one amino acid residue difference as compared to a modified APP polypeptide generated from editing a base of a nucleotide of the APP target RNA, where the at least one amino acid residue difference is selected from the group consisting of: K670E, K670R, K670G, M671V, A673V, A673T, D672G, E682G, H684R, K687R, K687E, K687G, I712X, T714X of the APP polypeptide, and any combination thereof. In some examples, the target RNA molecule encodes, at least in part, an amyloid precursor protein (APP); an APP start site; an APP cleavage site; or a beta secretase (BACE) or gamma secretase cleavage site of an APP protein. In some examples, cleavage of the APP protein at the cleavage site causes or contributes to Amyloid beta (A3 or Abeta) peptide deposition in the brain or blood vessels. In some examples, the Abeta deposition causes or contributes to a neurodegenerative disease. In some examples, the disease comprises Alzheimer's disease, Parkinson's disease, corticobasal degeneration, dementia with Lewy bodies, Lewy body variant of Alzheimer's disease, Parkinson's disease with dementia, Pick's disease, progressive supranuclear palsy, dementia, fronto-temporal dementia with Parkinsonism linked to tau mutations on chromosome 17, or any combination thereof. The engineered guide RNAs of the disclosure comprising a targeting sequence having substantial complementarity to an APP target RNA, where the engineered guide RNAs comprising a barbell macro-footprint sequence and at least some elements of a micro-footprint sequence can be used to facilitate an edit of a base of a nucleotide of the APP target RNA by an RNA editing entity forming an edited APP target RNA, such that a protein translated from the edited APP target RNA comprises at least one alteration or mutation described here. Accordingly, such engineered guide RNAs can be used in methods of treating a subject suffering from a neurodegenerative disease, such as but not limited to, Alzheimer's disease, Parkinson's disease, dementia, and the like.

[0307] A guide RNA targeting APP can comprise a first and second internal loop positioned with respect to the base that is most proximal to the A/C mismatch in the guide-target RNA complex. In some embodiments, the first internal loop is positioned from about 5 bases away from the A/C mismatch to about 20 bases away from the A/C mismatch with respect to the base of the first internal loop that is most proximal to the A/C mismatch. In some embodiments, the first internal loop is positioned 10 bases away from the A/C mismatch with respect to the base of the first internal loop that is most proximal to the A/C mismatch. In some embodiments, the second internal loop is positioned from about 15 bases away from the A/C mismatch to about 40 bases away from the A/C mismatch with respect to the base of the second internal loop that is most proximal to the A/C mismatch. In some embodiments, the second internal loop is positioned 33 bases away from the A/C mismatch with respect to the base of the second internal loop that is most proximal to the A/C mismatch.

[0308] An engineered guide RNA targeting APP can comprise a polynucleotide sequence with at least 80%, 85%, 90%, 92%, 95%, 97%, or 99% sequence identity to any one of SEQ ID NO: 112-114.

[0309] DMPK. In some embodiments, the present disclosure provides engineered guide RNAs comprising a targeting sequence sufficiently complementary to a DMPK target RNA, and a barbell macro-footprint sequence and at least some elements of a micro-footprint sequence, that facilitate RNA editing of DMPK to knockdown expression of myotonic dystrophy protein kinase. Myotonic dystrophy (DM1) is a rare neuromuscular disease characterized by progressive muscular weakness and an inability to relax muscles (myotonia), predominantly distal skeletal muscles. In some embodiments, the engineered guide RNAs comprising a barbell macro-footprint sequence and at least some elements of a micro-footprint sequence, which targets DMPK and compositions comprising such engineered guide RNAs facilitate ADAR-mediated RNA editing of DMPK to knockdown expression of myotonic dystrophy protein kinase.

[0310] DUX4. The present disclosure provides engineered guide RNAs comprising a barbell macro-footprint sequence and at least some elements of a micro-footprint sequence, and a targeting sequence sufficiently complementary to a DUX4 target RNA that facilitates RNA editing DUX4 to knockdown expression of DUX4 protein. Facioscapulohumeral muscular dystrophy (FSHD), an autosomal dominant neuromuscular disorder, is a rare neuromuscular disease characterized by progressive skeletal muscle weakness with significant heterogeneity in phenotypic severity and age of onset. Genetic causes of FSHD include mutations in the D4Z4 repeat region on chromosome 4 that lead to hypomethylation and dysregulated expression of the DUX4 gene (a germline transcription factor). In some embodiments, the present disclosure provides compositions of engineered guide RNAs that target DUX4 and comprise a barbell macro-footprint sequence and at least some elements of a micro-footprint sequence and facilitate ADAR-mediated RNA editing of DUX4, specifically, DUX4-FL to mediate DUX4-FL knockdown.

[0311] In some embodiments, the engineered guide RNAs of the present disclosure comprising a barbell macro-footprint sequence and at least some elements of a micro-footprint sequence facilitate ADAR-mediated RNA editing of target genes (e.g., DMPK, DUX4-FL), which results in knockdown of protein levels. The knockdown in protein levels is quantitated as a reduction in expression of the protein (e.g., DMPK protein: myotonic dystrophy protein kinase; DUX4-FL protein). The engineered guide RNAs of the present disclosure comprising a barbell macro-footprint sequence and at least some elements of a micro-footprint sequence and a targeting sequence sufficiently complementary to, for example, a DMPK or DUX4 target of interest, can facilitate from 1% to 100% DMPK protein knockdown or DUX4-FL protein knockdown. The engineered RNAs of the present disclosure can facilitate from 1% to 10%, from 10% to 20%, from 20% to 30%, from 30% to 40%, from 40% to 50%, from 50% to 60%, from 60% to 70%, from 70% to 80%, from 80% to 90%, from 90% to 100%, from 20% to 40%, from 30% to 50%, from 40% to 60%, from 50% to 70%, from 60% to 80%, from 20% to 50%, from 30% to 60%, at least 5%, at least 10%, at least 15%, at least 20%, at least 25%, at least 30%, at least 35%, at least 40%, at least 45%, at least 50%, at least 55%, at least 60%, at least 65%, at least 70%, at least 75%, at least 80%, at least 85%, or at least 90% DMPK protein knockdown or DUX4-FL protein knockdown. In some embodiments, the engineered RNAs of the present disclosure comprising a barbell macro-footprint sequence and at least some elements of a micro-footprint sequence facilitate from 30% to 60% DMPK protein knockdown or DUX4-FL protein knockdown. DMPK protein knockdown or DUX4-FL protein knockdown can be measured by an assay comparing a sample or subject treated with the engineered guide RNA of the disclosure comprising a barbell macro-footprint sequence and at least some elements of a micro-footprint sequence to a control sample or subject not treated with the engineered guide RNA comprising a barbell macro-footprint sequence and at least some elements of a micro-footprint sequence.

[0312] A guide RNA targeting DUX4 can comprise a first and second internal loop positioned with respect to the base that is most proximal to the A/C mismatch in the guide-target RNA complex. In some embodiments, the first internal loop is positioned from about 7 bases away from the A/C mismatch to about 30 bases away from the A/C mismatch with respect to the base of the first internal loop that is most proximal to the A/C mismatch. In some embodiments, the first internal loop is positioned 10 bases away from the A/C mismatch with respect to the base of the first internal loop that is most proximal to the A/C mismatch. In some embodiments, the second internal loop is positioned from about 18 bases away from the A/C mismatch to about 34 bases away from the A/C mismatch with respect to the base of the second internal loop that is most proximal to the A/C mismatch. In some embodiments, the second internal loop is positioned 34 bases away from the A/C mismatch with respect to the base of the second internal loop that is most proximal to the A/C mismatch.

[0313] An engineered guide RNA targeting DUX4 can comprise a polynucleotide sequence with at least 80%, 85%, 90%, 92%, 95%, 97%, or 99% sequence identity to any one of SEQ ID NO: 118-167, 2686-2728, 2769-2771, 2844-3078, or 3081-3082.

[0314] GRN. A guide RNA targeting GRN can comprise a first and second internal loop positioned with respect to the base that is most proximal to the A/C mismatch in the guide-target RNA complex. In some embodiments, the first internal loop is positioned from about 5 bases away from the A/C mismatch to about 20 bases away from the A/C mismatch with respect to the base of the first internal loop that is most proximal to the A/C mismatch. In some embodiments, the first internal loop is positioned 12 bases away from the A/C mismatch with respect to the base of the first internal loop that is most proximal to the A/C mismatch. In some embodiments, the second internal loop is positioned from about 18 bases away from the A/C mismatch to about 38 bases away from the A/C mismatch with respect to the base of the second internal loop that is most proximal to the A/C mismatch. In some embodiments, the second internal loop is positioned 34 bases away from the A/C mismatch with respect to the base of the second internal loop that is most proximal to the A/C mismatch.

[0315] LRRK2. The described engineered guide RNAs of the disclosure can comprise a targeting sequence with target complementarity to a leucine-rich repeat kinase 2 (LRRK2) target RNA, further comprising a barbell macro-footprint sequence and at least some elements of a micro-footprint sequence. In some embodiments, such engineered guide RNAs can facilitate RNA editing of LRRK2 encoded mutations associated with a disease or condition, where a LRRK2 encoded mutation can be selected from the group consisting of: E10L, A30P, S52F, E46K, A53T, L119P, A211V, C228S, E334K, N363S, V366M, A419V, R506Q, N544E, N551K, A716V, M712V, I723V, P755L, R793M, I810V, K871E, Q923H, Q930R, R1067Q, S1096C, Q1111H, 11122V, A1151T, L1165P, 11192V, H1216R, S1228T, P1262A, R1325Q, I1371V, R1398H, T1410M, D1420N, N1437H, R1441C, R1441G, R1441H, A1442P, P1446L, V1450I, K1468E, R1483Q, R1514Q, P1542S, V1613A, R₁₆₂₈P, M1646T, S1647T, Y1699C, R1728H, R1728L, L1795F, M1869V, M1869T, L1870F, E1874X, R1941H, Y2006H, I2012T, G2019S, I2020T, T2031S, N2081D, T2141M, R2143H, Y2189C, T2356I, G2385R, V2390M, E2395K, M2397T, L2466H, Q2490N, and any combination thereof. In some embodiments, such engineered guide RNAs that target LRRK2 and comprising a barbell macro-footprint sequence and at least some elements of a micro-footprint sequence can be used for treating a disease or condition such as a neurodegenerative disease (Parkinson's) by producing an edit, a knockdown or both of a pathogenic variant of LRRK2. In some aspects, a pathogenic variant of LRRK2 can comprise a G2019S mutation. The engineered guide RNAs targeting LRRK2 and comprising a barbell macro-footprint sequence and at least some elements of a micro-footprint sequence can be used to treat a LRRK2 associated disease or condition such as but not limited to a muscular dystrophy, an ornithine transcarbamylase deficiency, a retinitis pigmentosa, a breast cancer, an ovarian cancer, Alzheimer's disease, pain, Stargardt macular dystrophy, Charcot-Marie-Tooth disease, Rett syndrome, or any combination thereof.

[0316] A guide RNA targeting LRRK2 can comprise a first and second internal loop positioned with respect to the base that is most proximal to the A/C mismatch in the guide-target RNA complex. In some embodiments, the first internal loop is positioned from about 7 bases away from the A/C mismatch to about 30 bases away from the A/C mismatch with respect to the base of the first internal loop that is most proximal to the A/C mismatch. In some embodiments, the first internal loop is positioned 10 bases away from the A/C mismatch with respect to the base of the first internal loop that is most proximal to the A/C mismatch. In some embodiments, the second internal loop is positioned from about 18 bases away from the A/C mismatch to about 34 bases away from the A/C mismatch with respect to the base of the second internal loop that is most proximal to the A/C mismatch. In some embodiments, the second internal loop is positioned 34 bases away from the A/C mismatch with respect to the base of the second internal loop that is most proximal to the A/C mismatch.

[0317] An engineered guide RNA targeting LRRK2 can comprise a polynucleotide sequence with at least 80%, 85%, 90%, 92%, 95%, 97%, or 99% sequence identity to any one of SEQ ID NO: 118-167, 2686-2728, 2769-2771, 2844-3078, or 3081-3082.

[0318] PMP22. The present disclosure provides for engineered guide RNAs targeting PMP22 and comprising a barbell macro-footprint sequence and at least some elements of a micro-footprint sequence that facilitate RNA editing of PMP22 to knockdown expression of peripheral myelin protein-22 (PMP22). Charcot-Marie-Tooth Syndrome (CMT1A) is the most common genetically-driven peripheral neuropathy, characterized by progressive distal muscle atrophy, sensory loss and foot/hand deformities. In some embodiments, the present disclosure provides compositions of engineered guide RNAs that target PMP22 and comprising a barbell macro-footprint sequence and at least some elements of a micro-footprint sequence, which facilitate ADAR-mediated RNA editing of PMP22. In some embodiments, the engineered guide RNAs of the present disclosure target a coding sequence in PMP22. For example, the coding sequence can be a translation initiation site (TIS) (AUG) of PMP22 and the engineered guide RNAs disclosed here can facilitate ADAR-mediated RNA editing of AUG to GUG. The engineered guide RNAs of the present disclosure that target PMP22 and comprise a barbell macro-footprint sequence and at least some elements of a micro-footprint sequence can facilitate ADAR-mediated RNA editing of PMP22, thereby, effecting its protein knockdown.

[0319] SERPINA1. In some embodiments, the disclosure is directed to an engineered guide RNA comprising a barbell macro-footprint sequence and at least some elements of a micro-footprint sequence and a targeting sequence substantially complementary to the serpin family A member 1 (SERPINA1) target RNA, where the engineered guide RNA can facilitate RNA editing of SERPINA1. For example, such engineered guide RNAs can facilitate an ADAR-mediated correction of a G to A mutation at nucleotide position 9989 of a SERPINA1 gene (G9989A) or the SERPINA1 target RNA encodes a mutation of E342K. In some examples, the mutation causes or contributes to an antitrypsin (AAT) deficiency, such as alpha-1 antitrypsin deficiency (AATD) in a subject to whom the engineered guide RNA of the disclosure comprising a barbell macro-footprint sequence and at least some elements of a micro-footprint sequence can be administered. Some embodiments are directed to methods of treating a subject who can be human and at risk of developing or has developed alpha-1 antitrypsin deficiency. Such alpha-1 antitrypsin deficiency can be at least partially caused by a mutation of SERPINA1, for which an engineered guide RNA comprising a barbell macro-footprint sequence and at least some elements of a micro-footprint sequence described here can facilitate editing of the mutation in, for example, a human subject, thus correcting the mutation in SERPINA1 and reducing the incidence of alpha-1 antitrypsin deficiency in the subject. Accordingly, the engineered guide RNAs of the present disclosure targeting SERPINA1 and comprising a barbell macro-footprint sequence and at least some elements of a micro-footprint sequence can be used in a method of treating a subject suffering from an alpha-1 antitrypsin deficiency.

[0320] Some aspects provide engineered guide RNAs comprising exemplary targeting sequences that can target a SERPINA1 gene linked to any promoter (e.g., U1, U6, U7) disclosed herein that can be incorporated to drive expression of the engineered guide RNAs comprising a barbell macro-footprint sequence and at least some elements of a micro-footprint sequence. Alpha-1 antitrypsin deficiency can be at least partially caused by a mutation of SERPINA1, for which the engineered guide RNA described here can facilitate editing in, thus correcting the mutation in SERPINA1 and reducing the incidence of alpha-1 antitrypsin deficiency in the subject.

[0321] A guide RNA targeting SERPINA1 can comprise a first and second internal loop positioned with respect to the base that is most proximal to the A/C mismatch in the guide-target RNA complex. In some embodiments, the first internal loop is positioned from about 5 bases away from the A/C mismatch to about 20 bases away from the A/C mismatch with respect to the base of the first internal loop that is most proximal to the A/C mismatch. In some embodiments, the first internal loop is positioned 12 bases away from the A/C mismatch with respect to the base of the first internal loop that is most proximal to the A/C mismatch. In some embodiments, the second internal loop is positioned from about 12 bases away from the A/C mismatch to about 40 bases away from the A/C mismatch with respect to the base of the second internal loop that is most proximal to the A/C mismatch. In some embodiments, the second internal loop is positioned 24 bases away from the A/C mismatch with respect to the base of the second internal loop that is most proximal to the A/C mismatch

[0322] An engineered guide RNA targeting SERPINA1 can comprise a polynucleotide sequence with at least 80%, 85%, 90%, 92%, 95%, 97%, or 99% sequence identity to any one of SEQ ID NO: 2762-2768 or 3083-3086.

[0323] SNCA. In some embodiments, the present disclosure provides engineered guide RNAs, compositions, and methods of using the engineered guide RNAs comprising a barbell macro-footprint sequence and at least some elements of a micro-footprint sequence that can facilitate RNA editing of SNCA. In some embodiments, such engineered guide RNAs described here comprising a barbell macro-footprint sequence and at least some elements of a micro-footprint sequence can knock down expression of SNCA, for example, by facilitating editing at a 3′ UTR of an SNCA gene. Such engineered guide RNAs comprising a barbell macro-footprint sequence and at least some elements of a micro-footprint sequence targeting a site in SNCA can be encoded for by an engineered polynucleotide construct of the present disclosure. In some embodiments of the disclosure, the engineered guide RNAs described here comprising a targeting sequence with target complementarity to an alpha-synuclein (SNCA) target RNA, and comprising a barbell macro-footprint sequence and at least some elements of a micro-footprint sequence, can be used in the treatment of neurodegenerative disease, including but not limited to Alzheimer's disease or other diseases associated with an accumulation of Tau-p. In some examples, the engineered RNA comprises an engineered guide RNA, which targets an SNCA start codon.

[0324] In some examples, polymorphisms in either LRRK2 (G2019S) or SNCA can be associated with an increased risk of idiopathic Parkinson's Disease, and the disease or condition can comprise idiopathic Parkinson's Disease. In some examples, administration of the engineered RNAs disclosed herein comprising a barbell macro-footprint sequence and at least some elements of a micro-footprint sequence can edit LRRK2 G2019S (G>A conversion at the 6055th nucleotide) and edit the start codon SNCA by editing any of the nucleotides of the ATG to decrease the expression of SNCA. Some examples of the disclosure provide for engineered guide RNAs comprising a targeting sequence with sufficient complementarity to an SNCA target RNA and comprising a barbell macro-footprint sequence and at least some elements of a micro-footprint sequence, where the SNCA comprises a mutation for RNA editing selected from the group consisting of: a translation initiation site (TIS) AUG to GTG in Codon 1, a TIS AUG in Codon 5, an AUG at position 265 in Exon 2, and any combination thereof.

[0325] A guide RNA targeting SNCA can comprise a first and second internal loop positioned with respect to the base that is most proximal to the A/C mismatch in the guide-target RNA complex. In some embodiments, the first internal loop is positioned from about 6 bases away from the A/C mismatch to about 20 bases away from the A/C mismatch with respect to the base of the first internal loop that is most proximal to the A/C mismatch. In some embodiments, the first internal loop is positioned 6 bases away from the A/C mismatch with respect to the base of the first internal loop that is most proximal to the A/C mismatch. In some embodiments, the second internal loop is positioned from about 15 bases away from the A/C mismatch to about 38 bases away from the A/C mismatch with respect to the base of the second internal loop that is most proximal to the A/C mismatch. In some embodiments, the second internal loop is positioned 34 bases away from the A/C mismatch with respect to the base of the second internal loop that is most proximal to the A/C mismatch

[0326] An engineered guide RNA targeting SNCA can comprise a polynucleotide sequence with at least 80%, 85%, 90%, 92%, 95%, 97%, or 99% sequence identity to any one of SEQ ID NO: 2480-2681.

[0327] MAPT. A guide RNA targeting MAPT can comprise a first and second internal loop positioned with respect to the base that is most proximal to the A/C mismatch in the guide-target RNA complex. In some embodiments, the first internal loop is positioned from about 5 bases away from the A/C mismatch to about 15 bases away from the A/C mismatch with respect to the base of the first internal loop that is most proximal to the A/C mismatch. In some embodiments, the first internal loop is positioned 15 bases away from the A/C mismatch with respect to the base of the first internal loop that is most proximal to the A/C mismatch. In some embodiments, the second internal loop is positioned from about 12 bases away from the A/C mismatch to about 40 bases away from the A/C mismatch with respect to the base of the second internal loop that is most proximal to the A/C mismatch. In some embodiments, the second internal loop is positioned 33 bases away from the A/C mismatch with respect to the base of the second internal loop that is most proximal to the A/C mismatch.

[0328] An engineered guide RNA targeting MAPT can comprise a polynucleotide sequence with at least 80%, 85%, 90%, 92%, 95%, 97%, or 99% sequence identity to any one of SEQ ID NO: 115-117, 1519-2479 or 2682-2685.

[0329] SOD1. The present disclosure provides for engineered guide RNAs comprising a barbell macro-footprint sequence and at least some elements of a micro-footprint sequence that facilitate RNA editing of SOD1 to knockdown expression of the superoxide dismutase enzyme. Amyotrophic lateral sclerosis (ALS) is a rapidly progressing neurodegenerative disease characterized by death of motor neurons and loss of voluntary muscle movement. While the exact cause of ALS is unknown, gain-of-function mutations in SOD1 account for ˜20% of familiar ALS and 2% of spontaneous ALS. In some embodiments, the present disclosure provides compositions of engineered guide RNAs that target SOD1 comprising a barbell macro-footprint sequence and at least some elements of a micro-footprint sequence and facilitate ADAR-mediated RNA editing of SOD1. The engineered guide RNAs of the present disclosure targeting SOD1 and comprising a barbell macro-footprint sequence and at least some elements of a micro-footprint sequence facilitate ADAR-mediated RNA editing of SOD1, thereby, effecting protein knockdown.

[0330] In some embodiments, an engineered RNA of the disclosure comprising an engineered guide RNA, which targets an SOD1 start codon, where the engineered guide RNA disclosed here comprises a barbell macro-footprint sequence and at least some elements of a micro-footprint sequence.

[0331] In some examples of the disclosure directed to any of the methods of treating a disease or condition in a subject, the subject can be a mammal, for example, a human. The subject of the disclosure can be a subject in need of treatment for a disease or condition, or the subject can be diagnosed with the disease or condition for treatment.

[0332] An engineered guide RNA, a polynucleotide encoding the engineered guide RNA of the present disclosure, a delivery vehicle comprising an engineered guide RNA or a polynucleotide encoding the engineered guide RNA of the disclosure, or a pharmaceutical composition comprising any of these can be used in a method of treating a disease or condition or in uses for preparing a medicament or for treating a disease or condition in a subject in need thereof. Some embodiments described here are directed to the use of the engineered polynucleotide or the engineered guide RNA of the disclosure for treating a disease, disorder, or condition in a subject in need thereof. Other embodiments described here provide for a method of treating a disease or condition in a subject in need thereof, where the method comprises administering to the subject, an effective amount of: (a) any of the engineered guide RNAs comprising a barbell macro-footprint sequence and at least some elements of a micro-footprint sequence described here; any of the polynucleotides encoding any of the engineered guide RNAs comprising a barbell macro-footprint sequence and at least some elements of a micro-footprint sequence described here; any of the delivery vehicles comprising: any of the engineered guide RNAs described here or any of the polynucleotides encoding any of the engineered guide RNAs described here; or any of the pharmaceutical compositions comprising: any of the engineered guide RNAs described here, any of the polynucleotides comprising any of the engineered guide RNAs described here, or any of the delivery vehicles comprising any of the engineered guide RNAs described here or any of the polynucleotides encoding any of the engineered guide RNAs described here; and (b) a pharmaceutically acceptable: excipient, diluent, or carrier, where the method treats the disease or condition in the subject. A disorder can be a disease, a condition, a genotype, a phenotype, or any state associated with an adverse effect. In some embodiments, treating a disease, condition, or disorder can comprise preventing, slowing progression of, reversing, or alleviating symptoms of the disease, condition, or disorder. A method of treating a disease, disorder, or condition can comprise in some embodiments, administering or delivering: any of the engineered guide RNAs comprising a barbell macro-footprint sequence and at least some elements of a micro-footprint sequence of the disclosure; any of the engineered polynucleotides encoding for any of the engineered guide RNAs of the disclosure; any of the delivery vehicles comprising any of the engineered guide RNAs comprising a barbell macro-footprint sequence and at least some elements of a micro-footprint sequence or any of the polynucleotides encoding the engineered guide RNAs described here; or any of the pharmaceutical compositions comprising: any of the engineered guide RNAs of the disclosure; any of the engineered polynucleotides encoding for any of the engineered guide RNAs of the disclosure; any of the delivery vehicles comprising any of the engineered guide RNAs disclosed here or any of the polynucleotides encoding the engineered guide RNAs described here, and a pharmaceutically acceptable: excipient, diluent, or carrier, where the method comprises administering or delivering any of the aforementioned to a subject or a cell of a subject in need thereof, to treat the disease, disorder, or condition in the subject. In some examples, the methods of treating a disease or condition.

[0333] In some embodiments, a method of treating a disease, disorder, or condition can comprise, administering or delivering any of the engineered polynucleotides encoding for any of the engineered guide RNAs comprising a barbell macro-footprint sequence and at least some elements of a micro-footprint sequence to a subject or a cell of a subject in need thereof expressing the engineered guide RNA in the subject or the cell of the subject in need thereof, to treat the disease, disorder, or condition in the subject. In some embodiments, an engineered guide RNA of the present disclosure can be used to treat a genetic disorder (e.g., FSHD, DM1, CMT1A, or ALS). In some embodiments, an engineered guide RNA comprising a barbell macro-footprint sequence and at least some elements of a micro-footprint sequence of the present disclosure can be used to treat a condition associated with one or more mutations. For example, disclosed herein are methods of treating FSHD with engineered guide RNAs targeting DUX4, where the engineered guide RNAs comprise a barbell macro-footprint sequence and at least some elements of a micro-footprint sequence. Also disclosed herein are methods of treating DM1 with engineered guide RNAs targeting DMPK, where the engineered guide RNAs comprise a barbell macro-footprint sequence and at least some elements of a micro-footprint sequence. Also disclosed herein are methods of treating CMT1A with engineered guide RNAs targeting PMP22, where the engineered guide RNAs comprise a barbell macro-footprint sequence and at least some elements of a micro-footprint sequence. Also disclosed herein are methods of treating ALS with engineered guide RNAs targeting SOD1, where the engineered guide RNAs comprise a barbell macro-footprint sequence and at least some elements of a micro-footprint sequence.

[0334] In some embodiments, the target RNA can be selected from the group consisting of: ABCA4, ALAS1, APP, ATP7B, CFTR, DMD, DMPK, DUX4, GAPDH, GBA, HEXA, HFE, LIPA, LRRK2, MAPT, PCSK9 start site, PINK1, PMP22, SERPINA1, SCNN1A start site, SNCA, or SOD1, a fragment of any one of these, and any combination thereof. In some embodiments, the target RNA can be ABCA4. In some embodiments, the ABCA4 can comprise a mutation selected from the group consisting of: G6320A; G5714A; G5882A; and any combination thereof. In some embodiments, the target RNA can be APP. In some embodiments, the engineered RNA can be configured to facilitate an edit of a base of a nucleotide of the APP target RNA by an RNA editing entity, such that a protein translated from the edited target RNA comprises at least one amino acid residue difference as compared to a wildtype APP polypeptide. In some embodiments, the at least one amino acid residue difference can be selected from the group consisting of: K670E, K670R, K670G, M671V, A673V, A673T, D672G, E682G, H684R, K687R, K687E, K687G, I712X, T714X of the APP polypeptide, and any combination thereof. In some embodiments, the target RNA can be SERPINA1. In some embodiments, the SERPINA1 can comprise a mutation of G9989A. In some embodiments, the target RNA can be SERPINA1 encoding a polypeptide with an E342K mutation, relative to a wildtype SERPINA1 polypeptide. In some embodiments, the target RNA can be LRRK2. In some embodiments, the LRRK2 RNA can encode a mutation in a polypeptide encoded by the target RNA, where the mutation can be selected from the group consisting of: E10L, A30P, S52F, E46K, A53T, L119P, A211V, C228S, E334K, N363S, V366M, A419V, R506Q, N544E, N551K, A716V, M712V, 1723V, P755L, R793M, 1810V, K871E, Q923H, Q930R, R1067Q, S1096C, Q1111H, 11122V, A1151T, L1165P, 11192V, H1216R, S1228T, P1262A, R1325Q, I1371V, R1398H, T1410M, D1420N, N1437H, R1441C, R1441G, R1441H, A1442P, P1446L, V1450I, K1468E, R1483Q, R1514Q, P1542S, V1613A, R1628P, M1646T, S1647T, Y1699C, R1728H, R1728L, L1795F, M1869V, M1869T, L1870F, E1874X, R1941H, Y2006H, I2012T, G2019S, I2020T, T2031S, N2081D, T2141M, R2143H, Y2189C, T2356I, G2385R, V2390M, E2395K, M2397T, L2466H, Q2490N, and any combination thereof. In some embodiments, the target RNA can be SNCA. In some embodiments, the engineered RNA can target a region of the SNCA RNA selected from the group consisting of: a translation initiation site (TIS) AUG to GTG in Codon 1, a TIS AUG in Codon 5, an AUG at position 265 in Exon 2, and any combination thereof.

### Administration

[0335] Administration can refer to methods that can be used to enable the delivery of a composition described herein (e.g., an engineered guide RNA) to the desired site of biological action. For example, an engineered guide RNA can be comprised in a DNA construct, a viral vector, or both and be administered by intravenous administration. In some embodiments of the disclosure, the uses or methods of treating as described here, can provide for various routes of administration. Administration disclosed herein to an area in need of treatment or therapy can be achieved by, for example, and not by way of limitation, oral administration, topical administration, intravenous administration, inhalation administration, or any combination thereof. In some embodiments, delivery or administration can include inhalation, otic, buccal, conjunctival, dental, endocervical, endosinusial, endotracheal, enteral, epidural, extra-amniotic, extracorporeal, hemodialysis, infiltration, injection (e.g., parenchymal injection, intra-thecal injection, intra-ventricular injection, intra-cisternal injection, intravenous injection), interstitial, intraabdominal, intraamniotic, intraarterial, intraarticular, intrabiliary, intrabronchial, intrabursal, intracardiac, intracartilaginous, intracaudal, intracavernous, intracavitary, intracerebroventricular, intracisternal, intracorneal, intracoronal, intracoronary, intracorpous cavernaosum, intradermal, intradiscal, intraductal, intraduodenal, intradural, intraepidermal, intraesophageal, intragastric, intragingival, intrahippocampal, intraileal, intralesional, intraluminal, intralymphatic, intramedullary, intrameningeal, intramuscular, intranasal, intraocular, intraovarian, intraparenchymal, intrapericardial, intraperitoneal, intrapleural, intraprostatic, intrapulmonary, intrasinal, intraspinal, intrasynovial, intratendinous, intratesticular, intrathoracic, intratubular, intratumor, intratympanic, intrauterine, intravascular, intravenous, intravenous bolus, intravenous drip, intravesical, intravitreal, iontophoresis, irrigation, laryngeal, nasal, nasogastric, ophthalmic, oral, oropharyngeal, parenteral, percutaneous, periarticular, peridural, perineural, periodontal, rectal, retrobulbar, subarachnoid, subconjunctival, subcutaneous, sublingual, submucosal, topical, transdermal, transmucosal, transplacental, transtracheal, transtympanic, ureteral, urethral, vaginal, infraorbital, intraparenchymal, intrathecal, intraventricular, stereotactic, or any combination thereof. Delivery can include parenteral administration (including intravenous, subcutaneous, intrathecal, intraperitoneal, intramuscular, intravascular or infusion), oral administration, inhalation administration, intraduodenal administration, rectal administration, or a combination thereof. Delivery can include direct application to the affected tissue or region of the body. In some cases, topical administration can comprise administering a lotion, a solution, an emulsion, a cream, a balm, an oil, a paste, a stick, an aerosol, a foam, a jelly, a foam, a mask, a pad, a powder, a solid, a tincture, a butter, a patch, a gel, a spray, a drip, a liquid formulation, an ointment to an external surface of a surface, such as a skin. Delivery can include a parenchymal injection, an intra-thecal injection, an intra-ventricular injection, an intra-cisternal injection, or an intravenous injection. A composition provided herein can be administered by any delivery method or route of administration. A method of administration can be by intra-arterial injection, intracisternal injection, intramuscular injection, intraparenchymal injection, intraperitoneal injection, intraspinal injection, intrathecal injection, intravenous injection, intraventricular injection, stereotactic injection, subcutaneous injection, epidural, or any combination thereof. Delivery can include parenteral administration (including intravenous, subcutaneous, intrathecal, intraperitoneal, intramuscular, intravascular or infusion administration). In some embodiments, delivery can comprise a nanoparticle, a liposome, an exosome, an extracellular vesicle, an implant, or a combination thereof. In some cases, delivery can be from a device. In some instances, delivery can be administered by a pump, an infusion pump, or a combination thereof. In some embodiments, delivery can be by an enema, an eye drop, a nasal spray, or any combination thereof. In some instances, a subject can administer the composition in the absence of supervision. In some instances, a subject can administer the composition under the supervision of a medical professional (e.g., a physician, nurse, physician's assistant, orderly, hospice worker, etc.). In some embodiments, a medical professional can administer the composition.

[0336] In some cases, administering can be oral ingestion. In some cases, delivery can be a capsule or a tablet. Oral ingestion delivery can comprise a tea, an elixir, a food, a drink, a beverage, a syrup, a liquid, a gel, a capsule, a tablet, an oil, a tincture, or any combination thereof. In some embodiments, a food can be a medical food. In some instances, a capsule can comprise hydroxymethylcellulose. In some embodiments, a capsule can comprise a gelatin, hydroxypropylmethyl cellulose, pullulan, or any combination thereof. In some cases, capsules can comprise a coating, for example, an enteric coating. In some embodiments, a capsule can comprise a vegetarian product or a vegan product such as a hypromellose capsule. In some embodiments, delivery can comprise inhalation by an inhaler, a diffuser, a nebulizer, a vaporizer, or a combination thereof.

[0337] In some embodiments, disclosed herein can be a method, comprising administering a composition disclosed herein to a subject (e.g., a human) in need thereof. In some instances, the method can treat or prevent a disease in the subject.

### Definitions

[0338] As used herein, the terms “about” and “approximately,” in reference to a number, is used herein to include numbers that fall within a range of 10%, 5%, or 1% in either direction (greater than or less than) the number unless otherwise stated or otherwise evident from the context (except where such number would exceed 100% of a possible value).

[0339] A double stranded RNA (dsRNA) substrate (e.g., a guide-target RNA scaffold) is formed upon hybridization of an engineered guide RNA of the present disclosure to a target RNA. As disclosed herein, a “bulge” refers to the structure substantially formed only upon formation of the guide-target RNA scaffold, where contiguous nucleotides in either the engineered guide RNA or the target RNA are not complementary to their positional counterparts on the opposite strand. A bulge can change the secondary or tertiary structure of the guide-target RNA scaffold. A bulge can have from 0 to 4 contiguous nucleotides on the guide RNA side of the guide-target RNA scaffold and 1 to 4 contiguous nucleotides on the target RNA side of the guide-target RNA scaffold or a bulge can have from 0 to 4 nucleotides on the target RNA side of the guide-target RNA scaffold and 1 to 4 contiguous nucleotides on the guide RNA side of the guide-target RNA scaffold. However, a bulge, as used herein, does not refer to a structure where a single participating nucleotide of the engineered guide RNA and a single participating nucleotide of the target RNA do not base pair—a single participating nucleotide of the engineered guide RNA and a single participating nucleotide of the target RNA that do not base pair is referred to herein as a mismatch. Further, where the number of participating nucleotides on either the guide RNA side or the target RNA side exceeds 4, the resulting structure is no longer considered a bulge, but rather, is considered an internal loop. In some embodiments, the guide-target RNA scaffold of the present disclosure has 2 bulges. In some embodiments, the guide-target RNA scaffold of the present disclosure has 3 bulges. In some embodiments, the guide-target RNA scaffold of the present disclosure has 4 bulges. Thus, a bulge can be a structural feature formed from latent structure provided by an engineered latent guide RNA.

[0340] In some embodiments, the presence of a bulge in a guide-target RNA scaffold can position or can help to position ADAR to selectively edit the target A in the target RNA and reduce off-target editing of non-target A(s) in the target RNA. In some embodiments, the presence of a bulge in a guide-target RNA scaffold can recruit or help recruit additional amounts of ADAR. Bulges in guide-target RNA scaffolds disclosed herein can recruit other proteins, such as other RNA editing entities. In some embodiments, a bulge positioned 5′ of the edit site can facilitate base-flipping of the target A to be edited. A bulge can also help confer sequence specificity for the A of the target RNA to be edited, relative to other A(s) present in the target RNA. For example, a bulge can help direct ADAR editing by constraining it in an orientation that yields selective editing of the target A.

[0341] As described here, a double stranded RNA (dsRNA) substrate (e.g., a guide-target RNA scaffold) is formed upon hybridization of an engineered guide RNA of the present disclosure to a target RNA. A bulge can be a symmetrical bulge or an asymmetrical bulge. A “symmetrical bulge” is formed when the same number of nucleotides is present on each side of the bulge. For example, a symmetrical bulge in a guide-target RNA scaffold of the present disclosure can have the same number of nucleotides on the engineered guide RNA side and the target RNA side of the guide-target RNA scaffold. A symmetrical bulge of the present disclosure can be formed by 2 nucleotides on the engineered guide RNA side of the guide-target RNA scaffold target and 2 nucleotides on the target RNA side of the guide-target RNA scaffold. A symmetrical bulge of the present disclosure can be formed by 3 nucleotides on the engineered guide RNA side of the guide-target RNA scaffold target and 3 nucleotides on the target RNA side of the guide-target RNA scaffold. A symmetrical bulge of the present disclosure can be formed by 4 nucleotides on the engineered guide RNA side of the guide-target RNA scaffold target and 4 nucleotides on the target RNA side of the guide-target RNA scaffold. Thus, a symmetrical bulge can be a structural feature formed from latent structure provided by an engineered latent guide RNA.

[0342] As disclosed here, a double stranded RNA (dsRNA) substrate (e.g., a guide-target RNA scaffold) is formed upon hybridization of an engineered guide RNA of the present disclosure to a target RNA. A bulge can be a symmetrical bulge or an asymmetrical bulge. An “asymmetrical bulge” is formed when a different number of nucleotides is present on each side of the bulge. For example, an asymmetrical bulge in a guide-target RNA scaffold of the present disclosure can have different numbers of nucleotides on the engineered guide RNA side and the target RNA side of the guide-target RNA scaffold. An asymmetrical bulge of the present disclosure can be formed by 0 nucleotides on the engineered guide RNA side of the guide-target RNA scaffold and 1 nucleotide on the target RNA side of the guide-target RNA scaffold. An asymmetrical bulge of the present disclosure can be formed by 0 nucleotides on the target RNA side of the guide-target RNA scaffold and 1 nucleotide on the engineered guide RNA side of the guide-target RNA scaffold. An asymmetrical bulge of the present disclosure can be formed by 0 nucleotides on the engineered guide RNA side of the guide-target RNA scaffold and 2 nucleotides on the target RNA side of the guide-target RNA scaffold. An asymmetrical bulge of the present disclosure can be formed by 0 nucleotides on the target RNA side of the guide-target RNA scaffold and 2 nucleotides on the engineered guide RNA side of the guide-target RNA scaffold. An asymmetrical bulge of the present disclosure can be formed by 0 nucleotides on the engineered guide RNA side of the guide-target RNA scaffold and 3 nucleotides on the target RNA side of the guide-target RNA scaffold. An asymmetrical bulge of the present disclosure can be formed by 0 nucleotides on the target RNA side of the guide-target RNA scaffold and 3 nucleotides on the engineered guide RNA side of the guide-target RNA scaffold. An asymmetrical bulge of the present disclosure can be formed by 0 nucleotides on the engineered guide RNA side of the guide-target RNA scaffold and 4 nucleotides on the target RNA side of the guide-target RNA scaffold. An asymmetrical bulge of the present disclosure can be formed by 0 nucleotides on the target RNA side of the guide-target RNA scaffold and 4 nucleotides on the engineered guide RNA side of the guide-target RNA scaffold. An asymmetrical bulge of the present disclosure can be formed by 1 nucleotide on the engineered guide RNA side of the guide-target RNA scaffold and 2 nucleotides on the target RNA side of the guide-target RNA scaffold. An asymmetrical bulge of the present disclosure can be formed by 1 nucleotide on the target RNA side of the guide-target RNA scaffold and 2 nucleotides on the engineered guide RNA side of the guide-target RNA scaffold. An asymmetrical bulge of the present disclosure can be formed by 1 nucleotide on the engineered guide RNA side of the guide-target RNA scaffold and 3 nucleotides on the target RNA side of the guide-target RNA scaffold. An asymmetrical bulge of the present disclosure can be formed by 1 nucleotide on the target RNA side of the guide-target RNA scaffold and 3 nucleotides on the engineered guide RNA side of the guide-target RNA scaffold. An asymmetrical bulge of the present disclosure can be formed by 1 nucleotide on the engineered guide RNA side of the guide-target RNA scaffold and 4 nucleotides on the target RNA side of the guide-target RNA scaffold. An asymmetrical bulge of the present disclosure can be formed by 1 nucleotide on the target RNA side of the guide-target RNA scaffold and 4 nucleotides on the engineered guide RNA side of the guide-target RNA scaffold. An asymmetrical bulge of the present disclosure can be formed by 2 nucleotides on the engineered guide RNA side of the guide-target RNA scaffold and 3 nucleotides on the target RNA side of the guide-target RNA scaffold. An asymmetrical bulge of the present disclosure can be formed by 2 nucleotides on the target RNA side of the guide-target RNA scaffold and 3 nucleotides on the engineered guide RNA side of the guide-target RNA scaffold. An asymmetrical bulge of the present disclosure can be formed by 2 nucleotides on the engineered guide RNA side of the guide-target RNA scaffold and 4 nucleotides on the target RNA side of the guide-target RNA scaffold. An asymmetrical bulge of the present disclosure can be formed by 2 nucleotides on the target RNA side of the guide-target RNA scaffold and 4 nucleotides on the engineered guide RNA side of the guide-target RNA scaffold. An asymmetrical bulge of the present disclosure can be formed by 3 nucleotides on the engineered guide RNA side of the guide-target RNA scaffold and 4 nucleotides on the target RNA side of the guide-target RNA scaffold. An asymmetrical bulge of the present disclosure can be formed by 3 nucleotides on the target RNA side of the guide-target RNA scaffold and 4 nucleotides on the engineered guide RNA side of the guide-target RNA scaffold. Thus, an asymmetrical bulge can be a structural feature formed from latent structure provided by an engineered latent guide RNA.

[0343] As disclosed herein, a “base paired (bp) region” refers to a region of the guide-target RNA scaffold in which bases in the guide RNA are paired with opposing bases in the target RNA. Base paired regions can extend from one end or proximal to one end of the guide-target RNA scaffold to or proximal to the other end of the guide-target RNA scaffold. Base paired regions can extend between two structural features. Base paired regions can extend from one end or proximal to one end of the guide-target RNA scaffold to or proximal to a structural feature. Base paired regions can extend from a structural feature to the other end of the guide-target RNA scaffold. In some embodiments, a base paired region has from 1 bp to 100 bp, from 1 bp to 90 bp, from 1 bp to 80 bp, from 1 bp to 70 bp, from 1 bp to 60 bp, from 1 bp to 50 bp, from 1 bp to 45 bp, from 1 bp to 40 bp, from 1 bp to 35 bp, from 1 bp to 30 bp, from 1 bp to 25 bp, from 1 bp to 20 bp, from 1 bp to 15 bp, from 1 bp to 10 bp, from 1 bp to 5 bp, from 5 bp to 10 bp, from 5 bp to 20 bp, from 10 bp to 20 bp, from 10 bp to 50 bp, from 5 bp to 50 bp, at least 1 bp, at least 2 bp, at least 3 bp, at least 4 bp, at least 5 bp, at least 6 bp, at least 7 bp, at least 8 bp, at least 9 bp, at least 10 bp, at least 12 bp, at least 14 bp, at least 16 bp, at least 18 bp, at least 20 bp, at least 25 bp, at least 30 bp, at least 35 bp, at least 40 bp, at least 45 bp, at least 50 bp, at least 60 bp, at least 70 bp, at least 80 bp, at least 90 bp, at least 100 bp.

[0344] “Canonical amino acids” refer to those 20 amino acids that occur in nature, including for example, the amino acids shown in TABLE 1.

TABLE 1
Naturally occurring amino acids indicated with the three letter abbreviations, one letter abbreviations,
structures, and corresponding codons
Non-polar, aliphatic residues

| | | | | |
|---|---|---|---|---|
| Glycine | Gly | G | [chemical structure] | GGU GGC GGA GGG |
| Alanine | Ala | A | [chemical structure] | GCU GCC GCA GCG |
| Valine | Val | V | [chemical structure] | GUU GUC GUA GUG |
| Leucine | Leu | L | [chemical structure] | UUA UUG CUU CUC CUA CUG |
| Isoleucine | Ile | I | [chemical structure] | AUU AUC AUA |
| Proline | Pro | P | [chemical structure] | CCU CCC CCA CCG |

Aromatic residues

| | | | | |
|---|---|---|---|---|
| Phenylalanine | Phe | F | [chemical structure] | UUU UUC |
| Tyrosine | Tyr | Y | [chemical structure] | UAU UAC |
| Tryptophan | Trp | W | [chemical structure] | UGG |

Polar, non-charged residues

| | | | | |
|---|---|---|---|---|
| Serine | Ser | S | [chemical structure] | UCU UCC UCA UCG AGU AGC |
| Threonine | Thr | T | [chemical structure] | ACU ACC ACA ACG |
| Cysteine | Cys | C | [chemical structure] | UGU UGC |
| Methionine | Met | M | [chemical structure] | AUG |
| Asparagine | Asn | N | [chemical structure] | AAU AAC |
| Glutamine | Gln | Q | [chemical structure] | CAA CAG |

Positively charged residues

| | | | | |
|---|---|---|---|---|
| Lysine | Lys | K | [chemical structure] | AAA AAG |
| Arginine | Arg | R | [chemical structure] | CGU CGC CGA CGG AGA AGG |
| Histidine | His | H | [chemical structure] | CAU CAC |

Negatively charged residues

| | | | | |
|---|---|---|---|---|
| Aspartate | Asp | D | [chemical structure] | GAU GAC |
| Glutamate | Glu | E | [chemical structure] | GAA GAG |

[0345] The term “complementary” or “complementarity” refers to the ability of a nucleic acid to form one or more bonds with a corresponding nucleic acid sequence by, for example, hydrogen bonding (e.g., traditional Watson-Crick), covalent bonding, or other similar methods. In Watson-Crick base pairing, a double hydrogen bond forms between nucleobases T and A, whereas a triple hydrogen bond forms between nucleobases C and G. For example, the sequence A-G-T can be complementary to the sequence T-C-A. A percent complementarity indicates the percentage of residues in a nucleic acid molecule which can form hydrogen bonds (e.g., Watson-Crick base pairing) with a second nucleic acid sequence (e.g., 5, 6, 7, 8, 9, 10 out of 10 being 50%, 60%, 70%, 80%, 90%, and 100% complementary, respectively). “Perfectly complementary” can mean that all the contiguous residues of a nucleic acid sequence will hydrogen bond with the same number of contiguous residues in a second nucleic acid sequence. “Substantially complementary” as used herein can refer to a degree of complementarity that can be at least 60%, 65%, 70%, 75%, 80%, 85%, 90%, 95%, 97%, 98%, 99%, or 100% over a region of 10, 15, 20, 25, 30, 35, 40, 45, 50, or more nucleotides, or can refer to two nucleic acids that hybridize under stringent conditions (e.g., stringent hybridization conditions). Nucleic acids can include nonspecific sequences. As used herein, the term “nonspecific sequence” or “not specific” can refer to a nucleic acid sequence that contains a series of residues that may not be designed to be complementary to or can be only partially complementary to any other nucleic acid sequence.

[0346] The terms “determining,” “measuring,” “evaluating,” “assessing,” “assaying,” and “analyzing” can be used interchangeably herein to refer to forms of measurement. The terms include determining if an element can be present or not (for example, detection). These terms can include quantitative, qualitative or quantitative and qualitative determinations. Assessing can be relative or absolute. “Detecting the presence of” can include determining the amount of something present in addition to determining whether it can be present or absent depending on the context.

[0347] The term “encode,” as used herein, refers to an ability of a polynucleotide to provide information or instructions sequence sufficient to produce a corresponding gene expression product. In a non-limiting example, mRNA can encode for a polypeptide during translation, whereas DNA can encode for an mRNA molecule during transcription.

[0348] As disclosed here, a double stranded RNA (dsRNA) substrate is formed upon hybridization of an engineered guide RNA of the present disclosure to a target RNA. The resulting dsRNA substrate is also referred to herein as a “guide-target RNA scaffold.” Described herein are “structural features” that can be present in a guide-target RNA scaffold of the present disclosure. Examples of features include a mismatch, a bulge (symmetrical bulge or asymmetrical bulge), an internal loop (symmetrical internal loop or asymmetrical internal loop), or a hairpin (a recruiting hairpin or a non-recruiting hairpin). Engineered guide RNAs of the present disclosure can have from 1 to 50 features. Engineered guide RNAs of the present disclosure can have from 1 to 5, from 5 to 10, from 10 to 15, from 15 to 20, from 20 to 25, from 25 to 30, from 30 to 35, from 35 to 40, from 40 to 45, from 45 to 50, from 5 to 20, from 1 to 3, from 4 to 5, from 2 to 10, from 20 to 40, from 10 to 40, from 20 to 50, from 30 to 50, from 4 to 7, or from 8 to 10 features. In some embodiments, structural features (e.g., mismatches, bulges, internal loops) can be formed from latent structure in an engineered latent guide RNA upon hybridization of the engineered latent guide RNA to a target RNA and, thus, formation of a guide-target RNA scaffold. In some embodiments, structural features are not formed from latent structures and are, instead, pre-formed structures (e.g., a GluR2 recruitment hairpin or a hairpin from U7 snRNA).

[0349] A “guide-target RNA scaffold,” as disclosed herein, is the resulting double stranded RNA formed upon hybridization of a guide RNA, with latent structure, to a target RNA. A guide-target RNA scaffold has one or more structural features formed within the double stranded RNA duplex upon hybridization. For example, the guide-target RNA scaffold can have one or more features selected from the group consisting of a bulge, mismatch, internal loop, hairpin, wobble base pair, and any combination thereof.

[0350] As disclosed herein, a “hairpin” is an RNA duplex wherein a portion of a single RNA strand has folded in upon itself to form the RNA duplex. The portion of the single RNA strand folds upon itself due to having nucleotide sequences that base pair to each other, where the nucleotide sequences are separated by an intervening sequence that does not base pair with itself, thus forming a base-paired portion and non-base paired, intervening loop portion. A hairpin can have from 10 to 500 nucleotides in length of the entire duplex structure. The loop portion of a hairpin can be from 3 to 15 nucleotides long. A hairpin can be present in any of the engineered guide RNAs disclosed herein. The engineered guide RNAs disclosed herein can have from 1 to 10 hairpins. In some embodiments, the engineered guide RNAs disclosed herein have 1 hairpin. In some embodiments, the engineered guide RNAs disclosed herein have 2 hairpins. As disclosed herein, a hairpin can include a recruitment hairpin or a non-recruitment hairpin. A hairpin can be located anywhere within the engineered guide RNAs of the present disclosure. In some embodiments, one or more hairpins is proximal to or present at the 3′ end of an engineered guide RNA of the present disclosure, proximal to or at the 5′ end of an engineered guide RNA of the present disclosure, proximal to or within the targeting domain of the engineered guide RNAs of the present disclosure, or any combination thereof.

[0351] As disclosed herein, a hairpin can refer to a recruitment hairpin, a non-recruitment hairpin, or any combination thereof. A “recruitment hairpin,” as disclosed herein, can recruit at least in part an RNA editing entity, such as ADAR. In some cases, a recruitment hairpin can be formed and present in the absence of binding to a target RNA. In some embodiments, a recruitment hairpin is a GluR2 domain or portion thereof. In some embodiments, a recruitment hairpin is an Alu domain or portion thereof. A recruitment hairpin, as defined herein, can include a naturally occurring ADAR substrate or truncations thereof. Thus, a recruitment hairpin such as GluR2 is a pre-formed structural feature that can be present in constructs comprising an engineered guide RNA, not a structural feature formed by latent structure provided in an engineered latent guide RNA. A recruitment hairpin, as described herein, can be a naturally occurring ADAR substrate or truncations thereof.

[0352] A “non-recruitment hairpin,” as disclosed herein, does not have a primary function of recruiting an RNA editing entity. A non-recruitment hairpin, in some instances, does not recruit an RNA editing entity. A non-recruitment hairpin can exhibit functionality that improves localization of the engineered guide RNA to the target RNA. In some embodiments, the non-recruitment hairpin improves nuclear retention. In some embodiments, the non-recruitment hairpin comprises a hairpin from U7 snRNA. Thus, a non-recruitment hairpin such as a hairpin from U7 snRNA is a pre-formed structural feature that can be present in constructs comprising engineered guide RNA constructs, not a structural feature formed by latent structure provided in an engineered latent guide RNA.

[0353] As used herein, the term percent “identity,” in the context of two or more nucleic acid or polypeptide sequences, can refer to two or more sequences or subsequences that have a specified percentage of nucleotides or amino acid residues that are the same, when compared and aligned for maximum correspondence, as measured using one of the sequence comparison algorithms described below (e.g., BLASTP and BLASTN or other algorithms available to persons of skill) or by visual inspection. Depending on the application, the percent “identity” can exist over a region of the sequence being compared, e.g., over a functional domain, or, alternatively, exist over the full length of the two sequences to be compared.

[0354] For sequence comparison, typically one sequence acts as a reference sequence to which test sequences are compared. When using a sequence comparison algorithm, test and reference sequences are input into a computer, subsequence coordinates are designated, if necessary, and sequence algorithm program parameters are designated. The sequence comparison algorithm then calculates the percent sequence identity for the test sequence(s) relative to the reference sequence, based on the designated program parameters.

[0355] For purposes herein, percent identity and sequence similarity can be performed using the BLAST algorithm, which is described in Altschul et al. (J. Mol. Biol. 215:403-410 (1990)) and incorporated herein by reference for its teachings in its entirety. Software for performing BLAST analyses is publicly available through the National Center for Biotechnology Information.

[0356] In some embodiments, a double stranded RNA (dsRNA) substrate (e.g., a guide-target RNA scaffold) is formed upon hybridization of an engineered guide RNA of the present disclosure to a target RNA. As disclosed herein, an “internal loop” refers to the structure substantially formed only upon formation of the guide-target RNA scaffold, where nucleotides in either the engineered guide RNA or the target RNA are not complementary to their positional counterparts on the opposite strand and where one side of the internal loop, either on the target RNA side or the engineered guide RNA side of the guide-target RNA scaffold, has 5 nucleotides or more. Where the number of participating nucleotides on both the guide RNA side and the target RNA side drops below 5, the resulting structure is no longer considered an internal loop, but rather, is considered a bulge or a mismatch, depending on the size of the structural feature. An internal loop can be a symmetrical internal loop or an asymmetrical internal loop. Internal loops present in the vicinity of the edit site can help with base flipping of the target A in the target RNA to be edited.

[0357] One side of the internal loop, either on the target RNA side or the engineered polynucleotide side of the guide-target RNA scaffold, can be formed by from 5 to 150 nucleotides. One side of the internal loop can be formed by 5, 6, 7, 8, 9, 10, 11, 12, 13, 14, 15, 16, 17, 18, 19, 20, 25, 30, 35, 40, 45, 50, 55, 60, 65, 70, 75, 80, 85, 90, 95, 100, 105, 110, 115, 120, 125, 120, 135, 140, 145, 150, 200, 250, 300, 350, 400, 450, 500, 600, 700, 800, 900, or 1000 nucleotides, or any number of nucleotides therebetween. One side of the internal loop can be formed by 5 nucleotides. One side of the internal loop can be formed by 10 nucleotides. One side of the internal loop can be formed by 15 nucleotides. One side of the internal loop can be formed by 20 nucleotides. One side of the internal loop can be formed by 25 nucleotides. One side of the internal loop can be formed by 30 nucleotides. One side of the internal loop can be formed by 35 nucleotides. One side of the internal loop can be formed by 40 nucleotides. One side of the internal loop can be formed by 45 nucleotides. One side of the internal loop can be formed by 50 nucleotides. One side of the internal loop can be formed by 55 nucleotides. One side of the internal loop can be formed by 60 nucleotides. One side of the internal loop can be formed by 65 nucleotides. One side of the internal loop can be formed by 70 nucleotides. One side of the internal loop can be formed by 75 nucleotides. One side of the internal loop can be formed by 80 nucleotides. One side of the internal loop can be formed by 85 nucleotides. One side of the internal loop can be formed by 90 nucleotides. One side of the internal loop can be formed by 95 nucleotides. One side of the internal loop can be formed by 100 nucleotides. One side of the internal loop can be formed by 110 nucleotides. One side of the internal loop can be formed by 120 nucleotides. One side of the internal loop can be formed by 130 nucleotides. One side of the internal loop can be formed by 140 nucleotides. One side of the internal loop can be formed by 150 nucleotides. One side of the internal loop can be formed by 200 nucleotides. One side of the internal loop can be formed by 250 nucleotides. One side of the internal loop can be formed by 300 nucleotides. One side of the internal loop can be formed by 350 nucleotides. One side of the internal loop can be formed by 400 nucleotides. One side of the internal loop can be formed by 450 nucleotides. One side of the internal loop can be formed by 500 nucleotides. One side of the internal loop can be formed by 600 nucleotides. One side of the internal loop can be formed by 700 nucleotides. One side of the internal loop can be formed by 800 nucleotides. One side of the internal loop can be formed by 900 nucleotides. One side of the internal loop can be formed by 1000 nucleotides. Thus, an internal loop can be a structural feature formed from latent structure provided by an engineered latent guide RNA.

[0358] As described here, a double stranded RNA (dsRNA) substrate (e.g., a guide-target RNA scaffold) is formed upon hybridization of an engineered guide RNA of the present disclosure to a target RNA. An internal loop can be a symmetrical internal loop or an asymmetrical internal loop. A “symmetrical internal loop” is formed when the same number of nucleotides is present on each side of the internal loop. For example, a symmetrical internal loop in a guide-target RNA scaffold of the present disclosure can have the same number of nucleotides on the engineered guide RNA side and the target RNA side of the guide-target RNA scaffold. A symmetrical internal loop of the present disclosure can be formed by 5 nucleotides on the engineered guide RNA side of the guide-target RNA scaffold target and 5 nucleotides on the target RNA side of the guide-target RNA scaffold. A symmetrical internal loop of the present disclosure can be formed by 6 nucleotides on the engineered guide RNA side of the guide-target RNA scaffold target and 6 nucleotides on the target RNA side of the guide-target RNA scaffold. A symmetrical internal loop of the present disclosure can be formed by 7 nucleotides on the engineered guide RNA side of the guide-target RNA scaffold target and 7 nucleotides on the target RNA side of the guide-target RNA scaffold. A symmetrical internal loop of the present disclosure can be formed by 8 nucleotides on the engineered guide RNA side of the guide-target RNA scaffold target and 8 nucleotides on the target RNA side of the guide-target RNA scaffold. A symmetrical internal loop of the present disclosure can be formed by 9 nucleotides on the engineered guide RNA side of the guide-target RNA scaffold target and 9 nucleotides on the target RNA side of the guide-target RNA scaffold. A symmetrical internal loop of the present disclosure can be formed by 10 nucleotides on the engineered guide RNA side of the guide-target RNA scaffold target and 10 nucleotides on the target RNA side of the guide-target RNA scaffold. A symmetrical internal loop of the present disclosure can be formed by 15 nucleotides on the engineered polynucleotide side of the guide-target RNA scaffold target and 15 nucleotides on the target RNA side of the guide-target RNA scaffold. A symmetrical internal loop of the present disclosure can be formed by 20 nucleotides on the engineered polynucleotide side of the guide-target RNA scaffold target and 20 nucleotides on the target RNA side of the guide-target RNA scaffold. A symmetrical internal loop of the present disclosure can be formed by 30 nucleotides on the engineered polynucleotide side of the guide-target RNA scaffold target and 30 nucleotides on the target RNA side of the guide-target RNA scaffold. A symmetrical internal loop of the present disclosure can be formed by 40 nucleotides on the engineered polynucleotide side of the guide-target RNA scaffold target and 40 nucleotides on the target RNA side of the guide-target RNA scaffold. A symmetrical internal loop of the present disclosure can be formed by 50 nucleotides on the engineered polynucleotide side of the guide-target RNA scaffold target and 50 nucleotides on the target RNA side of the guide-target RNA scaffold. A symmetrical internal loop of the present disclosure can be formed by 60 nucleotides on the engineered polynucleotide side of the guide-target RNA scaffold target and 60 nucleotides on the target RNA side of the guide-target RNA scaffold. A symmetrical internal loop of the present disclosure can be formed by 70 nucleotides on the engineered polynucleotide side of the guide-target RNA scaffold target and 70 nucleotides on the target RNA side of the guide-target RNA scaffold. A symmetrical internal loop of the present disclosure can be formed by 80 nucleotides on the engineered polynucleotide side of the guide-target RNA scaffold target and 80 nucleotides on the target RNA side of the guide-target RNA scaffold. A symmetrical internal loop of the present disclosure can be formed by 90 nucleotides on the engineered polynucleotide side of the guide-target RNA scaffold target and 90 nucleotides on the target RNA side of the guide-target RNA scaffold. A symmetrical internal loop of the present disclosure can be formed by 100 nucleotides on the engineered polynucleotide side of the guide-target RNA scaffold target and 100 nucleotides on the target RNA side of the guide-target RNA scaffold. A symmetrical internal loop of the present disclosure can be formed by 110 nucleotides on the engineered polynucleotide side of the guide-target RNA scaffold target and 110 nucleotides on the target RNA side of the guide-target RNA scaffold. A symmetrical internal loop of the present disclosure can be formed by 120 nucleotides on the engineered polynucleotide side of the guide-target RNA scaffold target and 120 nucleotides on the target RNA side of the guide-target RNA scaffold. A symmetrical internal loop of the present disclosure can be formed by 130 nucleotides on the engineered polynucleotide side of the guide-target RNA scaffold target and 130 nucleotides on the target RNA side of the guide-target RNA scaffold. A symmetrical internal loop of the present disclosure can be formed by 140 nucleotides on the engineered polynucleotide side of the guide-target RNA scaffold target and 140 nucleotides on the target RNA side of the guide-target RNA scaffold. A symmetrical internal loop of the present disclosure can be formed by 150 nucleotides on the engineered polynucleotide side of the guide-target RNA scaffold target and 150 nucleotides on the target RNA side of the guide-target RNA scaffold. A symmetrical internal loop of the present disclosure can be formed by 200 nucleotides on the engineered polynucleotide side of the guide-target RNA scaffold target and 200 nucleotides on the target RNA side of the guide-target RNA scaffold. A symmetrical internal loop of the present disclosure can be formed by 250 nucleotides on the engineered polynucleotide side of the guide-target RNA scaffold target and 250 nucleotides on the target RNA side of the guide-target RNA scaffold. A symmetrical internal loop of the present disclosure can be formed by 300 nucleotides on the engineered polynucleotide side of the guide-target RNA scaffold target and 300 nucleotides on the target RNA side of the guide-target RNA scaffold. A symmetrical internal loop of the present disclosure can be formed by 350 nucleotides on the engineered polynucleotide side of the guide-target RNA scaffold target and 350 nucleotides on the target RNA side of the guide-target RNA scaffold. A symmetrical internal loop of the present disclosure can be formed by 400 nucleotides on the engineered polynucleotide side of the guide-target RNA scaffold target and 400 nucleotides on the target RNA side of the guide-target RNA scaffold. A symmetrical internal loop of the present disclosure can be formed by 450 nucleotides on the engineered polynucleotide side of the guide-target RNA scaffold target and 450 nucleotides on the target RNA side of the guide-target RNA scaffold. A symmetrical internal loop of the present disclosure can be formed by 500 nucleotides on the engineered polynucleotide side of the guide-target RNA scaffold target and 500 nucleotides on the target RNA side of the guide-target RNA scaffold. A symmetrical internal loop of the present disclosure can be formed by 600 nucleotides on the engineered polynucleotide side of the guide-target RNA scaffold target and 600 nucleotides on the target RNA side of the guide-target RNA scaffold. A symmetrical internal loop of the present disclosure can be formed by 700 nucleotides on the engineered polynucleotide side of the guide-target RNA scaffold target and 700 nucleotides on the target RNA side of the guide-target RNA scaffold. A symmetrical internal loop of the present disclosure can be formed by 800 nucleotides on the engineered polynucleotide side of the guide-target RNA scaffold target and 800 nucleotides on the target RNA side of the guide-target RNA scaffold. A symmetrical internal loop of the present disclosure can be formed by 900 nucleotides on the engineered polynucleotide side of the guide-target RNA scaffold target and 900 nucleotides on the target RNA side of the guide-target RNA scaffold. A symmetrical internal loop of the present disclosure can be formed by 1000 nucleotides on the engineered polynucleotide side of the guide-target RNA scaffold target and 1000 nucleotides on the target RNA side of the guide-target RNA scaffold. Thus, a symmetrical internal loop can be a structural feature formed from latent structure provided by an engineered latent guide RNA.

[0359] As disclosed here, a double stranded RNA (dsRNA) substrate (e.g., a guide-target RNA scaffold) is formed upon hybridization of an engineered guide RNA of the present disclosure to a target RNA. An internal loop can be a symmetrical internal loop or an asymmetrical internal loop. An “asymmetrical internal loop” is formed when a different number of nucleotides is present on each side of the internal loop. For example, an asymmetrical internal loop in a guide-target RNA scaffold of the present disclosure can have different numbers of nucleotides on the engineered guide RNA side and the target RNA side of the guide-target RNA scaffold.

[0360] An asymmetrical internal loop of the present disclosure can be formed by from 5 to 150 nucleotides on the engineered polynucleotide side of the guide-target RNA scaffold and from 5 to 150 nucleotides on the target RNA side of the guide-target RNA scaffold, wherein the number of nucleotides is the different on the engineered side of the guide-target RNA scaffold target than the number of nucleotides on the target RNA side of the guide-target RNA scaffold. An asymmetrical internal loop of the present disclosure can be formed by from 5 to 1000 nucleotides on the engineered polynucleotide side of the guide-target RNA scaffold and from 5 to 1000 nucleotides on the target RNA side of the guide-target RNA scaffold, wherein the number of nucleotides is the different on the engineered side of the guide-target RNA scaffold target than the number of nucleotides on the target RNA side of the guide-target RNA scaffold. An asymmetrical internal loop of the present disclosure can be formed by 5 nucleotides on the engineered guide RNA side of the guide-target RNA scaffold and 6 nucleotides on the target RNA side of the guide-target RNA scaffold. An asymmetrical internal loop of the present disclosure can be formed by 5 nucleotides on the target RNA side of the guide-target RNA scaffold and 6 nucleotides on the engineered guide RNA side of the guide-target RNA scaffold. An asymmetrical internal loop of the present disclosure can be formed by 5 nucleotides on the engineered guide RNA side of the guide-target RNA scaffold and 7 nucleotides on the target RNA side of the guide-target RNA scaffold. An asymmetrical internal loop of the present disclosure can be formed by 5 nucleotides on the target RNA side of the guide-target RNA scaffold and 7 nucleotides on the engineered guide RNA side of the guide-target RNA scaffold. An asymmetrical internal loop of the present disclosure can be formed by 5 nucleotides on the engineered guide RNA side of the guide-target RNA scaffold and 8 nucleotides internal loop the target RNA side of the guide-target RNA scaffold. An asymmetrical internal loop of the present disclosure can be formed by 5 nucleotides on the target RNA side of the guide-target RNA scaffold and 8 nucleotides on the engineered guide RNA side of the guide-target RNA scaffold. An asymmetrical internal loop of the present disclosure can be formed by 5 nucleotides on the engineered guide RNA side of the guide-target RNA scaffold and 9 nucleotides internal loop the target RNA side of the guide-target RNA scaffold. An asymmetrical internal loop of the present disclosure can be formed by 5 nucleotides on the target RNA side of the guide-target RNA scaffold and 9 nucleotides on the engineered guide RNA side of the guide-target RNA scaffold. An asymmetrical internal loop of the present disclosure can be formed by 5 nucleotides on the engineered guide RNA side of the guide-target RNA scaffold and 10 nucleotides internal loop the target RNA side of the guide-target RNA scaffold. An asymmetrical internal loop of the present disclosure can be formed by 5 nucleotides on the target RNA side of the guide-target RNA scaffold and 10 nucleotides on the engineered guide RNA side of the guide-target RNA scaffold. An asymmetrical internal loop of the present disclosure can be formed by 6 nucleotides on the engineered guide RNA side of the guide-target RNA scaffold and 7 nucleotides internal loop the target RNA side of the guide-target RNA scaffold. An asymmetrical internal loop of the present disclosure can be formed by 6 nucleotides on the target RNA side of the guide-target RNA scaffold and 7 nucleotides on the engineered guide RNA side of the guide-target RNA scaffold. An asymmetrical internal loop of the present disclosure can be formed by 6 nucleotides on the engineered guide RNA side of the guide-target RNA scaffold and 8 nucleotides internal loop the target RNA side of the guide-target RNA scaffold. An asymmetrical internal loop of the present disclosure can be formed by 6 nucleotides on the target RNA side of the guide-target RNA scaffold and 8 nucleotides on the engineered guide RNA side of the guide-target RNA scaffold. An asymmetrical internal loop of the present disclosure can be formed by 6 nucleotides on the engineered guide RNA side of the guide-target RNA scaffold and 9 nucleotides internal loop the target RNA side of the guide-target RNA scaffold. An asymmetrical internal loop of the present disclosure can be formed by 6 nucleotides on the target RNA side of the guide-target RNA scaffold and 9 nucleotides on the engineered guide RNA side of the guide-target RNA scaffold. An asymmetrical internal loop of the present disclosure can be formed by 6 nucleotides on the engineered guide RNA side of the guide-target RNA scaffold and 10 nucleotides internal loop the target RNA side of the guide-target RNA scaffold. An asymmetrical internal loop of the present disclosure can be formed by 6 nucleotides on the target RNA side of the guide-target RNA scaffold and 10 nucleotides on the engineered guide RNA side of the guide-target RNA scaffold. An asymmetrical internal loop of the present disclosure can be formed by 7 nucleotides on the engineered guide RNA side of the guide-target RNA scaffold and 8 nucleotides internal loop the target RNA side of the guide-target RNA scaffold. An asymmetrical internal loop of the present disclosure can be formed by 7 nucleotides on the target RNA side of the guide-target RNA scaffold and 8 nucleotides on the engineered guide RNA side of the guide-target RNA scaffold. An asymmetrical internal loop of the present disclosure can be formed by 7 nucleotides on the engineered guide RNA side of the guide-target RNA scaffold and 9 nucleotides internal loop the target RNA side of the guide-target RNA scaffold. An asymmetrical internal loop of the present disclosure can be formed by 7 nucleotides on the target RNA side of the guide-target RNA scaffold and 9 nucleotides on the engineered guide RNA side of the guide-target RNA scaffold. An asymmetrical internal loop of the present disclosure can be formed by 7 nucleotides on the engineered guide RNA side of the guide-target RNA scaffold and 10 nucleotides internal loop the target RNA side of the guide-target RNA scaffold. An asymmetrical internal loop of the present disclosure can be formed by 7 nucleotides on the target RNA side of the guide-target RNA scaffold and 10 nucleotides on the engineered guide RNA side of the guide-target RNA scaffold. An asymmetrical internal loop of the present disclosure can be formed by 8 nucleotides on the engineered guide RNA side of the guide-target RNA scaffold and 9 nucleotides internal loop the target RNA side of the guide-target RNA scaffold. An asymmetrical internal loop of the present disclosure can be formed by 8 nucleotides on the target RNA side of the guide-target RNA scaffold and 9 nucleotides on the engineered guide RNA side of the guide-target RNA scaffold. An asymmetrical internal loop of the present disclosure can be formed by 8 nucleotides on the engineered guide RNA side of the guide-target RNA scaffold and 10 nucleotides internal loop the target RNA side of the guide-target RNA scaffold. An asymmetrical internal loop of the present disclosure can be formed by 8 nucleotides on the target RNA side of the guide-target RNA scaffold and 10 nucleotides on the engineered guide RNA side of the guide-target RNA scaffold. An asymmetrical internal loop of the present disclosure can be formed by 9 nucleotides on the engineered guide RNA side of the guide-target RNA scaffold and 10 nucleotides internal loop the target RNA side of the guide-target RNA scaffold. An asymmetrical internal loop of the present disclosure can be formed by 9 nucleotides on the target RNA side of the guide-target RNA scaffold and 10 nucleotides on the engineered guide RNA side of the guide-target RNA scaffold. An asymmetrical internal loop of the present disclosure can be formed by 5 nucleotides on the target RNA side of the guide-target RNA scaffold and 50 nucleotides on the engineered polynucleotide side of the guide-target RNA scaffold. An asymmetrical internal loop of the present disclosure can be formed by 5 nucleotides on the target RNA side of the guide-target RNA scaffold and 100 nucleotides on the engineered polynucleotide side of the guide-target RNA scaffold. An asymmetrical internal loop of the present disclosure can be formed by 5 nucleotides on the target RNA side of the guide-target RNA scaffold and 150 nucleotides on the engineered polynucleotide side of the guide-target RNA scaffold. An asymmetrical internal loop of the present disclosure can be formed by 5 nucleotides on the target RNA side of the guide-target RNA scaffold and 200 nucleotides on the engineered polynucleotide side of the guide-target RNA scaffold. An asymmetrical internal loop of the present disclosure can be formed by 5 nucleotides on the target RNA side of the guide-target RNA scaffold and 300 nucleotides on the engineered polynucleotide side of the guide-target RNA scaffold. An asymmetrical internal loop of the present disclosure can be formed by 5 nucleotides on the target RNA side of the guide-target RNA scaffold and 400 nucleotides on the engineered polynucleotide side of the guide-target RNA scaffold. An asymmetrical internal loop of the present disclosure can be formed by 5 nucleotides on the target RNA side of the guide-target RNA scaffold and 500 nucleotides on the engineered polynucleotide side of the guide-target RNA scaffold. An asymmetrical internal loop of the present disclosure can be formed by 5 nucleotides on the target RNA side of the guide-target RNA scaffold and 1000 nucleotides on the engineered polynucleotide side of the guide-target RNA scaffold. An asymmetrical internal loop of the present disclosure can be formed by 1000 nucleotides on the target RNA side of the guide-target RNA scaffold and 5 nucleotides on the engineered polynucleotide side of the guide-target RNA scaffold. An asymmetrical internal loop of the present disclosure can be formed by 500 nucleotides on the target RNA side of the guide-target RNA scaffold and 5 nucleotides on the engineered polynucleotide side of the guide-target RNA scaffold. An asymmetrical internal loop of the present disclosure can be formed by 400 nucleotides on the target RNA side of the guide-target RNA scaffold and 5 nucleotides on the engineered polynucleotide side of the guide-target RNA scaffold. An asymmetrical internal loop of the present disclosure can be formed by 300 nucleotides on the target RNA side of the guide-target RNA scaffold and 5 nucleotides on the engineered polynucleotide side of the guide-target RNA scaffold. An asymmetrical internal loop of the present disclosure can be formed by 200 nucleotides on the target RNA side of the guide-target RNA scaffold and 5 nucleotides on the engineered polynucleotide side of the guide-target RNA scaffold. An asymmetrical internal loop of the present disclosure can be formed by 150 nucleotides on the target RNA side of the guide-target RNA scaffold and 5 nucleotides on the engineered polynucleotide side of the guide-target RNA scaffold. An asymmetrical internal loop of the present disclosure can be formed by 100 nucleotides on the target RNA side of the guide-target RNA scaffold and 5 nucleotides on the engineered polynucleotide side of the guide-target RNA scaffold. An asymmetrical internal loop of the present disclosure can be formed by 50 nucleotides on the target RNA side of the guide-target RNA scaffold and 5 nucleotides on the engineered polynucleotide side of the guide-target RNA scaffold. An asymmetrical internal loop of the present disclosure can be formed by 50 nucleotides on the target RNA side of the guide-target RNA scaffold and 100 nucleotides on the engineered polynucleotide side of the guide-target RNA scaffold. An asymmetrical internal loop of the present disclosure can be formed by 50 nucleotides on the target RNA side of the guide-target RNA scaffold and 150 nucleotides on the engineered polynucleotide side of the guide-target RNA scaffold. An asymmetrical internal loop of the present disclosure can be formed by 50 nucleotides on the target RNA side of the guide-target RNA scaffold and 200 nucleotides on the engineered polynucleotide side of the guide-target RNA scaffold. An asymmetrical internal loop of the present disclosure can be formed by 50 nucleotides on the target RNA side of the guide-target RNA scaffold and 300 nucleotides on the engineered polynucleotide side of the guide-target RNA scaffold. An asymmetrical internal loop of the present disclosure can be formed by 50 nucleotides on the target RNA side of the guide-target RNA scaffold and 400 nucleotides on the engineered polynucleotide side of the guide-target RNA scaffold. An asymmetrical internal loop of the present disclosure can be formed by 50 nucleotides on the target RNA side of the guide-target RNA scaffold and 500 nucleotides on the engineered polynucleotide side of the guide-target RNA scaffold. An asymmetrical internal loop of the present disclosure can be formed by 50 nucleotides on the target RNA side of the guide-target RNA scaffold and 1000 nucleotides on the engineered polynucleotide side of the guide-target RNA scaffold. An asymmetrical internal loop of the present disclosure can be formed by 1000 nucleotides on the target RNA side of the guide-target RNA scaffold and 50 nucleotides on the engineered polynucleotide side of the guide-target RNA scaffold. An asymmetrical internal loop of the present disclosure can be formed by 500 nucleotides on the target RNA side of the guide-target RNA scaffold and 50 nucleotides on the engineered polynucleotide side of the guide-target RNA scaffold. An asymmetrical internal loop of the present disclosure can be formed by 400 nucleotides on the target RNA side of the guide-target RNA scaffold and 50 nucleotides on the engineered polynucleotide side of the guide-target RNA scaffold. An asymmetrical internal loop of the present disclosure can be formed by 300 nucleotides on the target RNA side of the guide-target RNA scaffold and 50 nucleotides on the engineered polynucleotide side of the guide-target RNA scaffold. An asymmetrical internal loop of the present disclosure can be formed by 200 nucleotides on the target RNA side of the guide-target RNA scaffold and 50 nucleotides on the engineered polynucleotide side of the guide-target RNA scaffold. An asymmetrical internal loop of the present disclosure can be formed by 150 nucleotides on the target RNA side of the guide-target RNA scaffold and 50 nucleotides on the engineered polynucleotide side of the guide-target RNA scaffold. An asymmetrical internal loop of the present disclosure can be formed by 100 nucleotides on the target RNA side of the guide-target RNA scaffold and 50 nucleotides on the engineered polynucleotide side of the guide-target RNA scaffold. An asymmetrical internal loop of the present disclosure can be formed by 100 nucleotides on the target RNA side of the guide-target RNA scaffold and 150 nucleotides on the engineered polynucleotide side of the guide-target RNA scaffold. An asymmetrical internal loop of the present disclosure can be formed by 100 nucleotides on the target RNA side of the guide-target RNA scaffold and 200 nucleotides on the engineered polynucleotide side of the guide-target RNA scaffold. An asymmetrical internal loop of the present disclosure can be formed by 100 nucleotides on the target RNA side of the guide-target RNA scaffold and 300 nucleotides on the engineered polynucleotide side of the guide-target RNA scaffold. An asymmetrical internal loop of the present disclosure can be formed by 100 nucleotides on the target RNA side of the guide-target RNA scaffold and 400 nucleotides on the engineered polynucleotide side of the guide-target RNA scaffold. An asymmetrical internal loop of the present disclosure can be formed by 100 nucleotides on the target RNA side of the guide-target RNA scaffold and 500 nucleotides on the engineered polynucleotide side of the guide-target RNA scaffold. An asymmetrical internal loop of the present disclosure can be formed by 100 nucleotides on the target RNA side of the guide-target RNA scaffold and 1000 nucleotides on the engineered polynucleotide side of the guide-target RNA scaffold. An asymmetrical internal loop of the present disclosure can be formed by 1000 nucleotides on the target RNA side of the guide-target RNA scaffold and 100 nucleotides on the engineered polynucleotide side of the guide-target RNA scaffold. An asymmetrical internal loop of the present disclosure can be formed by 500 nucleotides on the target RNA side of the guide-target RNA scaffold and 100 nucleotides on the engineered polynucleotide side of the guide-target RNA scaffold. An asymmetrical internal loop of the present disclosure can be formed by 400 nucleotides on the target RNA side of the guide-target RNA scaffold and 100 nucleotides on the engineered polynucleotide side of the guide-target RNA scaffold. An asymmetrical internal loop of the present disclosure can be formed by 300 nucleotides on the target RNA side of the guide-target RNA scaffold and 100 nucleotides on the engineered polynucleotide side of the guide-target RNA scaffold. An asymmetrical internal loop of the present disclosure can be formed by 200 nucleotides on the target RNA side of the guide-target RNA scaffold and 100 nucleotides on the engineered polynucleotide side of the guide-target RNA scaffold. An asymmetrical internal loop of the present disclosure can be formed by 150 nucleotides on the target RNA side of the guide-target RNA scaffold and 100 nucleotides on the engineered polynucleotide side of the guide-target RNA scaffold. An asymmetrical internal loop of the present disclosure can be formed by 150 nucleotides on the target RNA side of the guide-target RNA scaffold and 200 nucleotides on the engineered polynucleotide side of the guide-target RNA scaffold. An asymmetrical internal loop of the present disclosure can be formed by 150 nucleotides on the target RNA side of the guide-target RNA scaffold and 300 nucleotides on the engineered polynucleotide side of the guide-target RNA scaffold. An asymmetrical internal loop of the present disclosure can be formed by 150 nucleotides on the target RNA side of the guide-target RNA scaffold and 400 nucleotides on the engineered polynucleotide side of the guide-target RNA scaffold. An asymmetrical internal loop of the present disclosure can be formed by 150 nucleotides on the target RNA side of the guide-target RNA scaffold and 500 nucleotides on the engineered polynucleotide side of the guide-target RNA scaffold. An asymmetrical internal loop of the present disclosure can be formed by 150 nucleotides on the target RNA side of the guide-target RNA scaffold and 1000 nucleotides on the engineered polynucleotide side of the guide-target RNA scaffold. An asymmetrical internal loop of the present disclosure can be formed by 1000 nucleotides on the target RNA side of the guide-target RNA scaffold and 150 nucleotides on the engineered polynucleotide side of the guide-target RNA scaffold. An asymmetrical internal loop of the present disclosure can be formed by 500 nucleotides on the target RNA side of the guide-target RNA scaffold and 5 nucleotides on the engineered polynucleotide side of the guide-target RNA scaffold. An asymmetrical internal loop of the present disclosure can be formed by 400 nucleotides on the target RNA side of the guide-target RNA scaffold and 150 nucleotides on the engineered polynucleotide side of the guide-target RNA scaffold. An asymmetrical internal loop of the present disclosure can be formed by 300 nucleotides on the target RNA side of the guide-target RNA scaffold and 150 nucleotides on the engineered polynucleotide side of the guide-target RNA scaffold. An asymmetrical internal loop of the present disclosure can be formed by 200 nucleotides on the target RNA side of the guide-target RNA scaffold and 300 nucleotides on the engineered polynucleotide side of the guide-target RNA scaffold. An asymmetrical internal loop of the present disclosure can be formed by 200 nucleotides on the target RNA side of the guide-target RNA scaffold and 400 nucleotides on the engineered polynucleotide side of the guide-target RNA scaffold. An asymmetrical internal loop of the present disclosure can be formed by 200 nucleotides on the target RNA side of the guide-target RNA scaffold and 500 nucleotides on the engineered polynucleotide side of the guide-target RNA scaffold. An asymmetrical internal loop of the present disclosure can be formed by 200 nucleotides on the target RNA side of the guide-target RNA scaffold and 1000 nucleotides on the engineered polynucleotide side of the guide-target RNA scaffold. An asymmetrical internal loop of the present disclosure can be formed by 1000 nucleotides on the target RNA side of the guide-target RNA scaffold and 200 nucleotides on the engineered polynucleotide side of the guide-target RNA scaffold. An asymmetrical internal loop of the present disclosure can be formed by 500 nucleotides on the target RNA side of the guide-target RNA scaffold and 200 nucleotides on the engineered polynucleotide side of the guide-target RNA scaffold. An asymmetrical internal loop of the present disclosure can be formed by 400 nucleotides on the target RNA side of the guide-target RNA scaffold and 200 nucleotides on the engineered polynucleotide side of the guide-target RNA scaffold. An asymmetrical internal loop of the present disclosure can be formed by 300 nucleotides on the target RNA side of the guide-target RNA scaffold and 200 nucleotides on the engineered polynucleotide side of the guide-target RNA scaffold. An asymmetrical internal loop of the present disclosure can be formed by 300 nucleotides on the target RNA side of the guide-target RNA scaffold and 400 nucleotides on the engineered polynucleotide side of the guide-target RNA scaffold. An asymmetrical internal loop of the present disclosure can be formed by 300 nucleotides on the target RNA side of the guide-target RNA scaffold and 500 nucleotides on the engineered polynucleotide side of the guide-target RNA scaffold. An asymmetrical internal loop of the present disclosure can be formed by 300 nucleotides on the target RNA side of the guide-target RNA scaffold and 1000 nucleotides on the engineered polynucleotide side of the guide-target RNA scaffold. An asymmetrical internal loop of the present disclosure can be formed by 1000 nucleotides on the target RNA side of the guide-target RNA scaffold and 300 nucleotides on the engineered polynucleotide side of the guide-target RNA scaffold. An asymmetrical internal loop of the present disclosure can be formed by 500 nucleotides on the target RNA side of the guide-target RNA scaffold and 300 nucleotides on the engineered polynucleotide side of the guide-target RNA scaffold. An asymmetrical internal loop of the present disclosure can be formed by 400 nucleotides on the target RNA side of the guide-target RNA scaffold and 300 nucleotides on the engineered polynucleotide side of the guide-target RNA scaffold. An asymmetrical internal loop of the present disclosure can be formed by 400 nucleotides on the target RNA side of the guide-target RNA scaffold and 500 nucleotides on the engineered polynucleotide side of the guide-target RNA scaffold. An asymmetrical internal loop of the present disclosure can be formed by 400 nucleotides on the target RNA side of the guide-target RNA scaffold and 1000 nucleotides on the engineered polynucleotide side of the guide-target RNA scaffold. An asymmetrical internal loop of the present disclosure can be formed by 1000 nucleotides on the target RNA side of the guide-target RNA scaffold and 400 nucleotides on the engineered polynucleotide side of the guide-target RNA scaffold. An asymmetrical internal loop of the present disclosure can be formed by 500 nucleotides on the target RNA side of the guide-target RNA scaffold and 400 nucleotides on the engineered polynucleotide side of the guide-target RNA scaffold. An asymmetrical internal loop of the present disclosure can be formed by 500 nucleotides on the target RNA side of the guide-target RNA scaffold and 1000 nucleotides on the engineered polynucleotide side of the guide-target RNA scaffold. An asymmetrical internal loop of the present disclosure can be formed by 1000 nucleotides on the target RNA side of the guide-target RNA scaffold and 500 nucleotides on the engineered polynucleotide side of the guide-target RNA scaffold. Thus, an asymmetrical internal loop can be a structural feature formed from latent structure provided by an engineered latent guide RNA.

[0361] “Latent structure” refers to a structural feature that substantially forms only upon hybridization of a guide RNA to a target RNA. For example, the sequence of a guide RNA provides one or more structural features, but these structural features substantially form only upon hybridization to the target RNA, and thus the one or more latent structural features manifest as structural features upon hybridization to the target RNA. Upon hybridization of the guide RNA to the target RNA, the structural feature is formed and the latent structure provided in the guide RNA is, thus, unmasked.

[0362] An “engineered latent guide RNA” refers to an engineered guide RNA that comprises a portion of sequence that, upon hybridization or only upon hybridization to a target RNA, substantially forms at least a portion of a structural feature, other than a single A/C mismatch feature at the target adenosine to be edited.

[0363] “Messenger RNA” or “mRNA” are RNA molecules comprising a sequence that encodes a polypeptide or protein. In general, RNA can be transcribed from DNA. In some cases, precursor mRNA containing non-protein coding regions in the sequence can be transcribed from DNA and then processed to remove all or a portion of the non-coding regions (introns) to produce mature mRNA. As used herein, the term “pre-mRNA” can refer to the RNA molecule transcribed from DNA before undergoing processing to remove the non-protein coding regions.

[0364] A double stranded RNA (dsRNA) substrate (e.g., a guide-target RNA scaffold) is formed upon hybridization of an engineered guide RNA of the present disclosure to a target RNA. As disclosed herein, the term “mismatch” refers to a single nucleotide in a guide RNA that is unpaired to an opposing single nucleotide in a target RNA within the guide-target RNA scaffold. A mismatch can comprise any two single nucleotides that do not base pair. Where the number of participating nucleotides on the guide RNA side and the target RNA side exceeds 1, the resulting structure is no longer considered a mismatch, but rather, is considered a bulge or an internal loop, depending on the size of the structural feature. In some embodiments, a mismatch is an A/C mismatch. An A/C mismatch can comprise a C in an engineered guide RNA of the present disclosure opposite an A in a target RNA. An A/C mismatch can comprise an A in an engineered guide RNA of the present disclosure opposite a C in a target RNA. A G/G mismatch can comprise a G in an engineered guide RNA of the present disclosure opposite a G in a target RNA. In some embodiments, a mismatch positioned 5′ of the edit site can facilitate base-flipping of the target A to be edited. A mismatch can also help confer sequence specificity. Thus, a mismatch can be a structural feature formed from latent structure provided by an engineered latent guide RNA.

[0365] The term “mutation” as used herein, can refer to an alteration to a nucleic acid sequence or a polypeptide sequence that can be relative to a reference sequence. A mutation can occur in a DNA molecule, a RNA molecule (e.g., tRNA, mRNA), or in a polypeptide or protein, or any combination thereof. The reference sequence can be obtained from a database such as the NCBI Reference Sequence Database (RefSeq) database. Specific changes that can constitute a mutation can include a substitution, a deletion, an insertion, an inversion, or a conversion in one or more nucleotides or one or more amino acids. Non-limiting examples of mutations in a nucleic acid sequence that, without the mutation, encodes for a polypeptide sequence, include: “missense” mutations that can result in the substitution of one codon for another, “nonsense” mutations that can change a codon from one encoding a particular amino acid to a stop codon (which can result in truncated translation of proteins), or “silent” mutations that can be those which have no effect on the resulting protein. The mutation can be a “point mutation,” which can refer to a mutation affecting only one nucleotide in a DNA or RNA sequence. The mutation can be a “splice site mutations,” which can be present pre-mRNA (prior to processing to remove introns) resulting in mistranslation and often truncation of proteins from incorrect delineation of the splice site. A mutation can comprise a single nucleotide variation (SNV). A mutation can comprise a sequence variant, a sequence variation, a sequence alteration, or an allelic variant. A mutation can affect function. A mutation may not affect function. A mutation can occur at the DNA level in one or more nucleotides, at the ribonucleic acid (RNA) level in one or more nucleotides, at the protein level in one or more amino acids, or any combination thereof. The reference sequence can be obtained from a database such as the NCBI Reference Sequence Database (RefSeq) database. Specific changes that can constitute a mutation can include a substitution, a deletion, an insertion, an inversion, or a conversion in one or more nucleotides or one or more amino acids. A mutation can be a point mutation. A mutation can comprise a sequence variant, a sequence variation, a sequence alteration, or an allelic variant. The mutation can be a fusion gene. A fusion pair or a fusion gene can result from a mutation, such as a translocation, an interstitial deletion, a chromosomal inversion, or any combination thereof. A mutation can constitute variability in the number of repeated sequences, such as triplications, quadruplications, or others. For example, a mutation can be an increase or a decrease in a copy number associated with a given sequence (e.g., copy number variation, or CNV). A mutation can include two or more sequence changes in different alleles or two or more sequence changes in one allele. A mutation can include two different nucleotides at one position in one allele, such as a mosaic. A mutation can include two different nucleotides at one position in one allele, such as a chimeric. A mutation can be present in a malignant tissue. A presence or an absence of a mutation can indicate an increased risk to develop a disease or condition. A presence or an absence of a mutation can indicate a presence of a disease or condition. A mutation can be present in a benign tissue. Absence of a mutation can indicate that a tissue or sample is benign. As an alternative, absence of a mutation may not indicate that a tissue or sample is benign. Methods as described herein can comprise identifying a presence of a mutation in a sample.

[0366] A presence or an absence of a mutation can indicate an increased risk to develop a disease or condition. A presence or an absence of a mutation can indicate a presence of a disease or condition. A mutation can be present in a benign tissue. Absence of a mutation can indicate that a tissue or sample can be benign. As an alternative, absence of a mutation may not indicate that a tissue or sample can be benign. Methods as described herein can comprise identifying a presence of a mutation in a sample.

[0367] The terms “polynucleotide” and “oligonucleotide” can be used interchangeably and can refer to a polymeric form of nucleotides of any length, either deoxyribonucleotides or ribonucleotides or analogs thereof. Polynucleotides can have any three-dimensional structure and can perform any function, known or unknown. The following may be non-limiting examples of polynucleotides: a gene or gene fragment (for example, a probe, primer, EST or SAGE tag), exons, introns, messenger RNA (mRNA), transfer RNA, ribosomal RNA, RNAi, ribozymes, cDNA, recombinant polynucleotides, branched polynucleotides, plasmids, vectors, isolated DNA of any sequence, isolated RNA of any sequence, nucleic acid probes and primers. A polynucleotide can comprise modified nucleotides, such as methylated nucleotides and nucleotide analogs. If present, modifications to the nucleotide structure can be imparted before or after assembly of the polynucleotide. The sequence of nucleotides can be interrupted by non-nucleotide components. A polynucleotide can be further modified after polymerization, such as by conjugation with a labeling component. The term can also refer to both double- and single-stranded molecules. Unless otherwise specified or required, any embodiment of this disclosure that can be a polynucleotide encompasses both the double-stranded form and each of two complementary single-stranded forms known or predicted to make up the double-stranded form.

[0368] A polynucleotide can be composed of a specific sequence of nucleotides. A nucleotide comprises a nucleoside and a phosphate group. A nucleotide comprises a sugar (e.g., ribose or 2′deoxyribose) and a nucleobase, such as a nitrogenous base. Non-limiting examples of nucleobases include adenine (A), cytosine (C), guanine (G), thymine (T), uracil (U), and inosine (I). In some embodiments, I can be formed when hypoxanthine can be attached to ribofuranose via a P-N9-glycosidic bond, resulting in the chemical structure:

[chemical structure]

[0369] Some polynucleotide embodiments refer to a DNA sequence. In some embodiments, the DNA sequence can be interchangeable with a similar RNA sequence. Some embodiments refer to an RNA sequence. In some embodiments, the RNA sequence can be interchangeable with a similar DNA sequence. In some embodiments, Us and Ts can be interchanged in a sequence provided herein.

[0370] The term “protein”, “peptide” and “polypeptide” can be used interchangeably and in their broadest sense can refer to a compound of two or more subunit amino acids, amino acid analogs or peptidomimetics. The subunits can be linked by peptide bonds. In another embodiment, the subunit can be linked by other bonds, e.g., ester, ether, etc. A protein or peptide can contain at least two amino acids and no limitation can be placed on the maximum number of amino acids which can comprise a protein's or peptide's sequence. As used herein the term “amino acid” can refer to either natural amino acids, unnatural amino acids, or synthetic amino acids, including glycine and both the D and L optical isomers, amino acid analogs and peptidomimetics. As used herein, the term “fusion protein” can refer to a protein comprised of domains from more than one naturally occurring or recombinantly produced protein, where generally each domain serves a different function. In this regard, the term “linker” can refer to a protein fragment that can be used to link these domains together—optionally to preserve the conformation of the fused protein domains, prevent unfavorable interactions between the fused protein domains which can compromise their respective functions, or both.

[0371] The term “stop codon” can refer to a three nucleotide contiguous sequence within messenger RNA that signals a termination of translation. Non-limiting examples include in RNA, UAG (amber), UAA (ochre), UGA (umber, also known as opal) and in DNA TAG, TAA or TGA. Unless otherwise noted, the term can also include nonsense mutations within DNA or RNA that introduce a premature stop codon, causing any resulting protein to be abnormally shortened.

[0372] The term “structured motif,” as disclosed herein, comprises two or more features in a guide-target RNA scaffold.

[0373] The terms “subject,” “individual,” or “patient” can be used interchangeably herein. A “subject” refers to a biological entity containing expressed genetic materials. The biological entity can be a plant, animal, or microorganism, including, for example, bacteria, viruses, fungi, and protozoa. The subject can be tissues, cells and their progeny of a biological entity obtained in vivo or cultured in vitro. The subject can be a mammal. The mammal can be a human. The subject can be diagnosed or suspected of being at high risk for a disease. In some cases, the subject may be not necessarily diagnosed or suspected of being at high risk for the disease

[0374] The term “in vivo” refers to an event that takes place in a subject's body.

[0375] The term “ex vivo” refers to an event that takes place outside of a subject's body. An ex vivo assay may be not performed on a subject. Rather, it can be performed upon a sample separate from a subject. An example of an ex vivo assay performed on a sample can be an “in vitro” assay.

[0376] The term “in vitro” refers to an event that takes places contained in a container for holding laboratory reagent such that it can be separated from the biological source from which the material can be obtained. In vitro assays can encompass cell-based assays in which living or dead cells can be employed. In vitro assays can also encompass a cell-free assay in which no intact cells can be employed.

[0377] The term “wobble base pair” refers to two bases that weakly base pair. For example, a wobble base pair of the present disclosure can refer to a G paired with a U. Thus, a wobble base pair can be a structural feature formed from latent structure provided by an engineered latent guide RNA.

[0378] As used herein, the terms “treatment” or “treating” can be used in reference to a pharmaceutical or other intervention regimen for obtaining beneficial or desired results in the recipient. Beneficial or desired results include but may not be limited to a therapeutic benefit, a prophylactic benefit, or both. A therapeutic benefit can refer to eradication or amelioration of symptoms or of an underlying disorder being treated. Also, a therapeutic benefit can be achieved with the eradication or amelioration of one or more of the physiological symptoms associated with the underlying disorder such that an improvement can be observed in the subject, notwithstanding that the subject can still be afflicted with the underlying disorder. A prophylactic effect includes delaying, preventing, or eliminating the appearance of a disease or condition, delaying or eliminating the onset of symptoms of a disease or condition, slowing, halting, or reversing the progression of a disease or condition, or any combination thereof. For prophylactic benefit, a subject at risk of developing a particular disease, or to a subject reporting one or more of the physiological symptoms of a disease can undergo treatment, even though a diagnosis of this disease may not have been made.

[0379] The following examples are included for illustrative purposes only and are not intended to limit the scope of the present disclosure.

### EXAMPLES

### Example 1

### Exemplary Guide RNA Design Principles

[0380] FIG. 1 illustrates exemplary principles for generating engineered guide RNAs having barbell macro-footprint structures as described herein.
[0381] (1) Guide RNAs are selected in a high-throughput screen for their ability to facilitate editing of an adenosine of a target RNA via an adenosine deaminase. The selected guide RNAs contain micro-footprint, where the micro-footprint includes a region with latent structures near the 5′ end of the guide-target RNA scaffold and a complementary region near the 3′ end of the guide-target RNA scaffold. The composition of the latent structures and their positioning relative to the mismatch are engineered to generate a superior micro-footprint.
[0382] (2) Guide RNAs displaying the ability to facilitate editing are selected. To these guides are added macro-footprint sequences that produce a first internal loop/left barbell (LB) 5′ of the micro-footprint and a second internal loop/right barbell (RB) 3′ of the micro-footprint. The size of each barbell, as well as the positioning of the barbell relative to the micro-footprint, are generated to select guide RNAs with increased editing for an on-target adenosine of interest.
[0383] (3) Guide RNAs with the superior barbell of (2) are shortened in length at the 3′ end of the guide-target RNA scaffold as pictured in FIG. 1 or shortened in length at the 5′ end of the guide-target RNA scaffold to generate a superior guide RNA with a micro-footprint and macro-footprint.

[0384] Exemplary guide RNAs of the present disclosure are found in TABLE 17.

[0385] FIG. 2 illustrates a detailed overview of target RNA bound to a guide RNA with micro-footprint latent structures and macro-footprint barbell latent structures that manifest through hybridization with the target RNA.

[0386] The guide RNA of FIG. 2 comprises a 36 nt micro-footprint sequence having two regions. First, the exemplary guide has a 15 nt “RNA editing micro-footprint” that comprises a cytosine as the mismatched nucleotide opposite the adenosine to be edited. Second, the exemplary guide has a 21 nt “RNA editing perfect complementarity” sequence with complementarity to the target RNA.

[0387] Flanking the 36 nt micro-footprint is a right barbell and left barbell. The exemplary guide illustrated in FIG. 2 provides exemplary barbells that are each symmetrical internal loops, where the symmetrical loops each comprise 6 nucleotides of the guide RNA and 6 nucleotides of the target RNA when the latent structure manifests upon hybridization.

### Example 2

Exemplary Guide RNAs with ADAR1 Editing of ABCA4 G2237A Mutation

[0388] Exemplary guide RNAs were screened for facilitating editing of an G2237A point mutation in an ABCA4 mRNA. Each guide contains a micro-footprint sequence that produces micro-footprint latent structures as described herein. Parameters such as the length of the guide and the position of the mismatch were engineered to improve the amount of editing.

[0389] The upper panels of FIG. 3 illustrated the RNA editing percentages for controls (no transfection, GFP) and engineered guide RNAs having a total length of 40 bases and greater (e.g., 45, 50, 55, 60, 65, 70, 75, 80, 85, 90, 95, 100) and the upstream length or distance from the target position of ABCA4 (G2237A) (where the ABCA4 RNA comprises a substitution of a G with an A at nucleotide position 2237) was 20 bases or greater (e.g., 25, 30, 35, 40, 45, 50, 55, 60, 65, 70, 75, 80). The RNA editing percentages of ABCA4 engineered RNA guides and controls via ADAR were about 2% to about 16%.

[0390] The lower panels of FIG. 3 illustrate ADAR-mediated RNA editing percentages for three biological replicates (center, right) for various guide RNAs. Of the variants screened, the 0.85.65 demonstrated the best editing efficiencies via ADAR, with an editing efficient over 12% at target 0 position (or on-target editing) and minimal off-target edits of about 3%. The dashed line boxed around off-target peaks at target positions +13 and +15 for all three exemplified guides (e.g., 0.100.80 (left); biological replicates: 0.85.65 (center); and 0.85.65 (right)) clearly demonstrate that the 0.85.65 guides had improved editing efficiency, an increase in the amount or percentage of on-target editing, and a decrease in the amount, percentage, or both the amount and percentage of off-target editing.

[0391] The 0.85.65 guide RNA was utilized as a scaffold for generating the barbell macro-footprint in the following examples.

### Example 3

### Modifying the Positioning of the Right Barbell for Enhanced ADAR1 Editing of ABCA4 G5882A Mutation

[0392] Macro-footprint sequences were inserted into the 0.85.65 guide of Example 2 to produce a left barbell and a right barbell upon hybridization of the guide RNA with the ABCA4 mRNA. In this example, the positioning of the right barbell was engineered based on the improvement in editing efficiency.

[0393] FIG. 4 presents various engineered guide RNAs with barbells grafted onto guide 0.85.65 and their associated RNA editing percentages with ADAR1 of ABCA4 G5882A. The position of the second internal loop (RB) relative to the target position of the mismatch (e.g., target 0) was modulated from a position +17, +20, +24, +27, +30, +33, +36, and +39 bases from the target position. The exemplary guides of FIG. 4 (right panel) show that the left-most base of the second internal loop (RB) was positioned at +39, +36, +33, +30, +27, +24, +20, and +17 from target 0. FIG. 4 (left panel) provides the corresponding RNA editing percentages for each of the engineered guides with and without the barbell design (guide 0.85.65), as well as the controls (no transfection, GFP plasmid) via ADAR. Guides 0.85.65 (−5, +33) (˜33% and ˜29% for biological replicates 1 and 2, respectively) and 0.85.65 (−5, +27) (˜23% and ˜21% for biological replicates 1 and 2, respectively) demonstrated RNA editing percentages greater than that of the comparable 0.85.65 guide without or lacking the first and second internal loops (˜15% and ˜13% for biological replicates 1 and 2, respectively).

### Example 4

Comparison of Exemplary Guide RNAs with and without First and Second Internal Loops

[0394] The editing efficiency of engineered guide RNAs provided in Example 3 was determined via ADAR by sequencing to determine the amount of on target and off target editing. FIG. 5 shows the percent edited (Y-axis) at each of the target positions (X-axis), where target 0 represents the position of the intended or desired edit of the ABCA4 G5882A mutation with ADAR1. The top panel demonstrated the RNA editing percentage of less than about 20% at target 0 using guide 0.85.65 without the barbell design. The center panel (guide 0.85.65 (−5, +27)) and bottom panel (guide 0.85.65 (−5, +33) demonstrated a target 0 RNA editing percentage of about 20% or greater and with a decrease in the amount of off-target editing at, for example, positions +13, +15, and +39.

### Example 5

Exemplary Guide RNAs with Varied Coordinates of the Second Internal Loop

[0395] The 0.85.65 (−5, +33) guide RNA selected in Example 3 was utilized in this example for selecting superior positioning of the left barbell (LB).

[0396] FIG. 6 presents various engineered guide RNAs with barbells grafted onto guide 0.85.65 and their associated RNA editing percentages with ADAR1 of ABCA4 G5882A. The position of the first internal loop (LB) relative to the target position of the mismatch (e.g., target 0) was modulated from a position −5, −6, −7, −8, −9, −10, −11, and −12 from target 0. The exemplary guides of FIG. 7 (right panel) show that the right-most base of the first internal loop (LB) was positioned at −12, −11, −10, −9, −8, −7, −6, and −5 bases from target 0. FIG. 7 (left panel) provides the corresponding RNA editing percentages for each of the engineered guides with and without the barbell design (guide 0.85.65), as well as the controls (no transfection, GFP plasmid). Guides 0.85.65 (−9, +33) and 0.85.65 (−10, +33) (˜50% and ˜46% for biological replicates 1 and 2, respectively) each demonstrated RNA editing percentages via ADAR greater than that of the comparable 0.85.65 guide lacking the first and second internal loops (˜10% and ˜6% for biological replicates 1 and 2, respectively). FIG. 8 illustrates the on-target editing percentages via ADAR for the different guide RNAs 0.85.65 (−5, +33) (top panel); 0.85.65 (−9, +33) (center panel); and 0.85.65 (−10, +33) (bottom panel) as determined by sequencing. The RNA editing percentages of the aforementioned guides via ADAR at target 0, which was the second base of the GAA triplet identified in the top panel, were about 35%, about 45%, and about 45%, respectively. The third base of the GAA triplet was edited at a target position 1, and each of the aforementioned guides had RNA editing percentages of about 20%.

### Example 6

Selecting Mismatch Position for Exemplary Guide RNAs with Improved ADAR1 Editing of ABCA4 G5882A Mutation

[0397] The position of the mismatch position was selected for engineered guide RNAs with total guide lengths of 100 nucleotides having improved ADAR1 editing of ABCA4 G5882A mutation.

[0398] The upper panels of FIG. 9 present various engineered guide RNAs targeting ABCA4 G5882A mutation and controls, and their respective ADAR-mediated RNA editing percentages for two biological replicates (left and center panels) and the average RNA editing percentages (right panel). The position of the mismatch, relative to the guide length, is provided for each guide as the third number in the notation.

[0399] Each of RNA guides 0.100.65; 0.100.67; 0.100.70; and 0.100.72 (having the mismatch positioned at position 65, 67, 70, and 72, respectively) had an average ADAR-mediated RNA editing percentage over about 20%. The lower panel provides RNA editing percentages at target positions for the aforementioned RNA guides. Specifically, the ADAR-mediated RNA editing percentages at target 0 for guide RNAs 0.100.65 (˜20%); 0.100.67 (˜20%); 0.100.70 (˜25%); and 0.100.72 (˜23%) were all about 20% or greater.

### Example 7

Exemplary Guide RNAs with ADAR1 Editing of ABCA4 G5882A Mutation with Various Coordinates of the Second Internal Loop

[0400] Guide RNA 0.100.70 selected in Example 6 was used to modulate the positions of the second internal loop (RB) (FIG. 12) as in Example 3. The guide RNAs were modified such that the base of the second internal loop most proximal (or nearest) to target 0 position of the guide-target RNA scaffold was distanced at: +12 bases; +14 bases; +16 bases; +18 bases; +20 bases; +23 bases; +25 bases; +27 bases; +30 bases; +32 bases; +34 bases; +36 bases; +38 bases; and +40 bases from the target 0 position, while the base of the first internal loop most proximal (or nearest) to target 0 position of the guide-target RNA scaffold was distanced at −5 bases for all of the guide RNAs.

[0401] For example, the exemplary guides of FIG. 10 represented in FIG. 11 (right panel) show that the left-most base of the second internal loop (RB) was positioned at +12 bases; +14 bases; +16 bases; +18 bases; +20 bases; +23 bases; +25 bases; +27 bases; +30 bases; +32 bases; +34 bases; +36 bases; +38 bases; and +40 bases from target 0. FIG. 11 (left panel) provides the corresponding RNA editing percentages for each of the engineered guides via ADAR1 with and without the first and second internal loops (e.g., guide 0.100.70), as well as controls (no transfection, GFP plasmid). Guide 0.100.70 (−5, +32) (˜20% and ˜24% for biological replicates 1 and 2, respectively) demonstrated RNA editing percentages greater than that of the comparable 0.100.70 guide without or lacking the first and second internal loops (˜16% for each of biological replicates 1 and 2).

### Example 8

Exemplary Guide RNAs with ADAR1 Editing of ABCA4 G5882A Mutation with Various Coordinates of the First Internal Loop

[0402] Guide RNA 0.100.70 was used to modulate the positions of the first internal loop (LB) (FIG. 12) as in Example 5. The guide RNAs were modified such that the base of the first internal loop most proximal (or nearest) to target 0 position of the guide-target RNA scaffold was distanced at: −15 bases; −14 bases; −13 bases; −12 bases; −11 bases; −9 bases; −6 bases; −5 bases (−5, +33) and (−5, +32) from the target 0 position, while the base of the second internal loop most proximal (or nearest) to target 0 position of the guide-target RNA scaffold was distanced at +33 bases for all of the guide RNAs except guide 0.100.70 (−5, +32) and guide 0.100.70 without the first and second internal loops.

[0403] For example, the exemplary guides of FIG. 12 represented in FIG. 13 (right panel) show that the right-most base of the first internal loop (LB) was positioned at −15 bases; −14 bases; −13 bases; −12 bases; −11 bases; −9 bases; −6 bases; and −5 bases from target 0. FIG. 13 (left panel) provides the corresponding ADAR-mediated RNA editing percentages for each of the engineered guides with and without the first and second internal loops (e.g., guide 0.100.70), as well as controls (no transfection, GFP plasmid). All of the exemplary guide RNAs demonstrated ADAR-mediated RNA editing percentages of about 34%, except for guide 0.100.70 (−5, +32) and guide 0.100.70, which had ADAR-mediated RNA editing percentages of about 20% and the controls. FIG. 14 provides ADAR-mediated RNA editing percentages for on-target editing at target 0 for guide RNAs 0.100.70 (−5, +33) (center left panel); 0.100.70 (−9, +33) (bottom left panel); 0.100.70 (−13, +33) (top right panel); 0.100.70 (−14, +33) (center right panel); 0.100.70 (−15, +33) (bottom right panel). The aforementioned guides had ADAR-mediated RNA editing percentages (˜30%; ˜40%; about >40%; ˜45%; ˜45%) greater than the ADAR-mediated RNA editing percentage of ˜20% of the comparable 0.100.70 guide (top left panel) which lacks the first and second internal loops.

### Example 9

Exemplary Guide RNAs with ADAR1 Editing of ABCA4 G5882A Mutation Shortened from Guides 100.70 (−9, +33) and (−15, +33)

[0404] The guide RNAs produced in Example 8 with superior right and left barbells (guide 0.100.70 (−9, +33) and guide 0.100.70 (−15, +33)), each based on the 0.100.70 guide RNA, were further engineered to reduce the total guide RNA length for the region 3′ of the left barbell.

[0405] In FIG. 15, guide 0.100.70 (−9, +33) and guide 0.100.70 (−15, +33) were shortened such that the length ranged from 78 nucleotides to 100 nucleotides and the 3′ end of the dsRNA from target 0 position ranged from 48 nucleotides to 70 nucleotides, where each nucleotide was composed of a nucleic acid base. Exemplary guide RNAs were 0.78.48; 0.80.50; 0.82.52; 0.84.54; 0.86.56; 0.88.58; 0.90.60; 0.92.62; 0.94.64; 0.96.66; 0.98.68; 0.100.70, where a first internal loop was located at −9 or −15 upstream and +33 downstream of target 0 position. The various guide RNAs of 0.100.70 (−9, +33) were represented in FIG. 16 (right panel).

[0406] For example, the exemplary guides of FIG. 15 based on guide 0.100.70 (−9, +33) represented in FIG. 16 (right panel) show that the 3′ end of the dsRNA had a length from target 0 ranging from 48 nucleotides to 70 nucleotides. FIG. 16 (left panel) provides the corresponding RNA editing percentages for each of the engineered guides with the first and second internal loops (e.g., guide 0.100.70 (−9, +33)), as well as controls (no transfection, GFP plasmid) via ADAR1. Shortened guides 0.92.62; 0.94.64; and 0.96.66 with a first internal loop and a second internal loop at −9, +33, respectively, demonstrated ADAR-mediated RNA editing percentages of about 46% or greater for each of biological replicates 1 and 2. The ADAR-mediated RNA editing percentages (38% and 40% for biological replicates 1 and 2, respectively) of the full length 0.100.70 guide (−9, +33). FIG. 17 illustrates the on-target editing percentages via ADAR1 for the different guide RNAs 0.92.62 (−9, +33) (top panel); 0.94.64 (−9, +33) (center panel); and 0.96.66 (−9, +33) (bottom panel). The ADAR-mediated RNA editing percentages of the aforementioned guides at target 0 were about 50%, about 45%, and about 45%, respectively.

[0407] For example, the exemplary guides of FIG. 15 based on guide 0.100.70 (15, +33) represented in FIG. 18 (right panel) show that the 3′ end of the dsRNA had a length from target 0 ranging from 48 nucleotides to 70 nucleotides. FIG. 18 (left panel) provides the corresponding ADAR-mediated RNA editing percentages for each of the engineered guides with the first and second internal loops (e.g., guide 0.100.70 (−15, +33)), as well as controls (no transfection, GFP plasmid). Shortened guides 0.90.60; 0.92.62; and 0.94.64 with a first internal loop and a second internal loop at −15, +33, respectively, demonstrated ADAR-mediated RNA editing percentages of about 50% or greater for each of biological replicates 1 and 2. The ADAR-mediated RNA editing percentages (42% and 44% for biological replicates 1 and 2, respectively) of the full length 0.100.70 guide (−15, +33). FIG. 19 illustrates the on-target editing percentages for the different guide RNAs 0.90.60 (−15, +33) (top panel); 0.92.62 (−15, +33) (center panel); and 0.94.64 (−15, +33) (bottom panel)via ADAR1. The ADAR-mediated RNA editing percentages of the aforementioned guides at target 0 were each about 50%.

[0408] In order to determine the total cumulative effect of the superior left barbell, right barbell, and superior length, the ADAR-mediated editing efficiency of the superior guide with right and left barbells 0.92.62 (−15, +33) was compared to the 0.100.80 guide RNA comprising only the micro-footprint sequence. The top panel of FIG. 20 measured the on-target RNA editing percentage of about 12% for a guide 0.100.80 without first and second internal loops via ADAR1. The bottom panel measured the on-target RNA editing percentage of about 58% for a guide 0.92.62 with first and second internal loops (−15, +33) via ADAR1. Accordingly, the presence of the right barbell and left barbell imparted significant increases in on-target RNA editing via ADAR1 relative to the guide RNA lacking the barbells.

### Example 10

### Guide RNAs Against GAPDH

[0409] In order to demonstrate the general applicability of the barbell macro-footprint toward improving on target editing via ADAR, various guide RNAs were selected for targeted ADAR-mediated editing of GAPDH mRNA. Various guide RNAs designed to target GAPDH are depicted in FIG. 21, showing exemplary guide-target RNA complexes formed by engineered guide RNA. As a comparison, the superior guide RNA targeting ABCA4 with first and second internal loops (−9, +33) is presented first, followed by a guide RNA targeting GAPDH with only an A-C mismatch (GAPDH 100.70 A-C), a guide RNA targeting with a micro-footprint targeting GAPDH (GAPDH Shaker mimicry), and a guide RNA targeting GAPDH with a micro-footprint and a barbell macro-footprint with first and second internal loops (GAPDH Shaker mimicry −9, +33).

[0410] In FIG. 22, the GAPDH shaker mimicry guide RNA containing first and second internal loops at position −9 and +33, respectively (as selected in the superior guide RNA targeting ABCA4 with first and second internal loops), demonstrated a significant increase in the amount of ADAR-mediated RNA editing in the target GAPDH RNA (˜25% and ˜28% for biological replicates 1 and 2, respectively) relative to an otherwise comparable engineered guide RNA lacking the first internal loop and the second internal loop, e.g., Shaker mimicry (micro-footprint only) (6% for each of the biological replicates 1 and 2).

[0411] In FIG. 23, the GAPDH shaker mimicry guide RNA (bottom panel) containing first and second internal loops at positions −9 and +33, respectively, from the target 0 position, demonstrated that the presence of the first and second internal loops facilitated an increase in the amount of ADAR-mediated editing of the on-target adenosine at target 0 in the target GAPDH RNA (˜30%) relative to an otherwise comparable engineered guide RNA lacking the first internal loop and the second internal loop, e.g., Shaker mimicry (micro-footprint only) (center panel) (<10%) and GAPDH with the A-C mismatch (top panel) (<10%). Furthermore, the presence of the first and second internal loops improved editing efficiency and decreased the amount, percentage, or both the amount and percentage of off-target editing or off-target adenosine.

[0412] Accordingly, this example demonstrates that the superior barbell macro-footprint engineered for improved on-target editing of ABCA4 via ADAR in Example 9 also imparts improved on-target editing against GAPDH, a distinctly different target. Thus, the present example demonstrates the general applicability of utilizing a superior barbell macro-footprint to improve on target editing by a target RNA via an adenosine deaminase.

### Example 11

### Guide RNAs Against Rab7a

[0413] In order to further demonstrate the general applicability of the barbell macro-footprint toward improving on target editing, various guide RNAs were selected for targeted editing of Rab7a mRNA via ADAR. Various guide RNAs designed to target Rab7a GAC are depicted in FIG. 24, showing exemplary guide-target RNA complexes formed by engineered RNA guides. The first is a guide RNA with only an A-C mismatch (Rab7a 100.70 A-C; SEQ ID NO:109) (top panel), the second is a guide RNA with a micro-footprint targeting Rab7a, (Rab7a 100.70 Shaker mimicry; SEQ ID NO:110) (center panel), and the third is a guide RNA targeting Rab7a with a micro-footprint and a barbell macro-footprint with first and second internal loops (Rab7a Shaker mimicry −9,+33; SEQ ID NO:111) (bottom panel).

[0414] The Rab7a shaker mimicry guide RNA containing first and second internal loops at positions −9 and +33 (as selected in the superior guide RNA targeting ABCA4), respectively, from the target 0 position, in FIG. 25, demonstrated that the presence of the first and second internal loops facilitated an increase in the amount of RNA editing in the target Rab7a 3′UTR 5′G target adenosine RNA (˜28% for biological replicates 1 and 2) relative to an otherwise comparable engineered guide RNA lacking the first internal loop and the second internal loop, e.g., Shaker mimicry (micro-footprint) (12% and 7% for biological replicates 1 and 2, respectively).

[0415] In FIG. 26, the Rab7a shaker mimicry guide RNA (bottom panel) containing first and second internal loops at position −9 and +33, respectively, from the target 0 position, demonstrated that the presence of the first and second internal loops facilitated an increase in the amount of editing of the on-target adenosine at target 0 in the target Rab7a RNA (˜30%) relative to an otherwise comparable engineered guide RNA lacking the first internal loop and the second internal loop, e.g., Shaker mimicry (micro-footprint) (center panel) (˜10%) and Rab7a with the A-C mismatch (top panel) (<10%). Furthermore, the presence of the first and second internal loops improved editing efficiency and decreased the amount, percentage, or both the amount and percentage of off-target editing or off-target adenosine.

[0416] Accordingly, this example demonstrates that the superior barbell macro-footprint engineered for improved on-target editing of ABCA4 in Example 9 also imparts improved on-target editing against Rab7a, a distinctly different target. Thus, the present example demonstrates the general applicability of utilizing a superior barbell macro-footprint to improve on target editing by a target RNA via an adenosine deaminase.

### Example 12

### Guide RNAs Against APP

[0417] In order to further demonstrate the general applicability of the barbell macro-footprint toward improving on target editing, various guide RNAs were selected for targeted editing of APP mRNA via ADAR. Various constructs of the disclosure encoding a guide RNA designed to target APP GAA depicted in FIG. 27 show exemplary guide-target RNA complexes formed by engineered RNA guides. The first is a guide RNA with only an A-C mismatch (APP GAA 100.70 A-C; SEQ ID NO:112) (top panel), the second is a guide RNA with a micro-footprint targeting APP (APP GAA 100.70 Shaker mimicry; SEQ ID NO:113) (center panel), and the third is a guide RNA targeting APP GAA with a micro-footprint and a barbell macro-footprint with first and second internal loops (APP GAA 100.70 Shaker mimicry −9,+33; SEQ ID NO:114) (bottom panel).

[0418] The APP shaker mimicry guide RNA containing first and second internal loops at positions −9 and +33 (as selected in the superior guide RNA targeting ABCA4), respectively, from the target 0 position, in FIG. 28, demonstrated that the presence of the first and second internal loops facilitated an increase in the amount of RNA editing in the target APP 5′G target adenosine RNA (˜14% and ˜13% for biological replicates 1 and 2, respectively) relative to an otherwise comparable engineered guide RNA lacking the first internal loop and the second internal loop, e.g., Shaker mimicry (micro-footprint) (˜0.5% and ˜1% for biological replicates 1 and 2, respectively).

[0419] In FIG. 29, the APP 5′G shaker mimicry guide RNA 0.100.70 (bottom panel) containing first and second internal loops at position −9 and +33, respectively, from the target 0 position, demonstrated that the presence of the first and second internal loops facilitated an increase in the amount of editing of the on-target adenosine at target 0 in the target APP 5′G RNA (˜10%) via ADAR, relative to an otherwise comparable engineered guide RNA lacking the first internal loop and the second internal loop, e.g., Shaker mimicry (micro-footprint) (center panel) (˜1%) and APP 5′G with the A-C mismatch (top panel) (˜1%). Furthermore, the presence of the first and second internal loops improved editing efficiency and decreased the amount, percentage, or both the amount and percentage of off-target editing or off-target adenosine.

[0420] Accordingly, this example demonstrates that the superior barbell macro-footprint engineered for improved on-target editing of ABCA4 in Example 9 also imparts improved on-target editing against APP, a distinctly different target. Thus, the present example demonstrates the general applicability of utilizing a superior barbell macro-footprint to improve on target editing by a target RNA via an adenosine deaminase.

### Example 13

### Guide RNAs Against MAPT

[0421] In order to further demonstrate the general applicability of the barbell macro-footprint toward improving on target editing, various guide RNAs were selected for targeted editing of MAPT mRNA via ADAR. Various constructs of the disclosure encoding a guide RNA designed to target MAPT 100.70 depicted in FIG. 30 show exemplary guide-target RNA complexes formed by engineered RNA guides. The first is a guide RNA with only an A-C mismatch (MAPT 100.70 A-C; SEQ ID NO:115) (top panel), the second is a guide RNA with the micro-footprint targeting MAPT (MAPT 100.70 Shaker mimicry; SEQ ID NO:116) (center panel), and the third is a guide RNA targeting MAPT with a micro-footprint and a barbell macro-footprint with first and second internal loops (MAPT 100.70 Shaker mimicry −9,+33; SEQ ID NO:117) (bottom panel).

[0422] The MAPT shaker mimicry guide RNA containing first and second internal loops at positions −9 and +33 (as selected in the superior guide RNA targeting ABCA4), respectively, from the target 0 position, in FIG. 31, demonstrated that the presence of the first and second internal loops facilitated an increase in the amount of RNA editing in the target MAPT 5′G target adenosine RNA (>40% for each of biological replicates 1 and 2) relative to an otherwise comparable engineered guide RNA lacking the first internal loop and the second internal loop, e.g., Shaker mimicry (micro-footprint) (˜5% for each of biological replicates 1 and 2). In FIG. 32, the MAPT 5′G TIS shaker mimicry guide RNA 0.100.70 (bottom panel) containing first and second internal loops at position −9 and +33, respectively, from the target 0 position, demonstrated that the presence of the first and second internal loops facilitated an increase in the amount of editing of the on-target adenosine at target 0 in the target MAPT 5′G TIS RNA (˜45%) relative to an otherwise comparable engineered guide RNA lacking the first internal loop and the second internal loop, e.g., Shaker mimicry (micro-footprint) (center panel) (˜5%) and MAPT 5′G TIS with the A-C mismatch (top panel) (˜5%). Furthermore, the presence of the first and second internal loops improved editing efficiency and decreased the amount, percentage, or both the amount and percentage of off-target editing or off-target adenosine.

[0423] Accordingly, this example demonstrates that the superior barbell macro-footprint engineered for improved on-target editing of ABCA4 in Example 9 also imparts improved on-target editing against MAPT, a distinctly different target. Thus, the present example demonstrates the general applicability of utilizing a superior barbell macro-footprint to improve on target editing by a target RNA via an adenosine deaminase.

### Example 14

High Throughput Screening of Engineered Guide RNAs Targeting LRRK2 mRNA

[0424] Using the compositions and methods described herein, high throughput screening (HTS) of long engineered guide RNAs (e.g., 100mer and longer) that target LRRK2 mRNA was performed, where said engineered guide RNAs form a micro-footprint comprised of various structural features in the guide-target RNA scaffold and form a barbell macro-footprint comprising two 6/6 internal loops near both ends of the guide-target RNA scaffold. Additionally, in this high throughput screen, self-annealing RNA structures were of a size (231 nucleotides) that allowed for screening for engineered guide RNAs that were 113 nucleotides in length, with the target adenosine to be edited positioned at the 57^{th} nucleotide. The high throughput screen was able to identify engineered guide RNAs that show high on-target adenosine editing (>60%, 30 min incubation with ADAR1 and ADAR2) and reduced to no local off-target adenosine editing (e.g., at the −2 position relative to the target adenosine to be edited, which is at position 0). Self-annealing RNA structures that formed a barbell macro-footprint in the guide-target RNA scaffold were screened to include 4 different micro-footprints (A/C mismatch (ATTCTACAGCAGTACTGAGCAATGCCGTAGTCAGCAATCTTTGCA (SEQ ID NO:168)), 2108 (ATTCTACGGCGGTACTGACCAATCCCGTAGTTAGCAATCTTTGCA (SEQ ID NO:169)), 871 (ATTCTACAGTAGGACTGAGCACTGCCGAGCTGGGCAATCTTT GCA (SEQ ID NO:170)), and 919 (CTTCTACAGCAGTTCGGAGGAATCCCGAGGTCAGCAATCTTTGCA (SEQ ID NO: 171))), tiling the position of the barbell macro-footprint from the −22 position to the −12 position at one end of the self-annealing RNA structure and from the +12 position to the +34 position at the other end of the self-annealing RNA structure. Self-annealing RNA structures comprising 1939 distinct guide RNA sequences and the sequences of the regions targeted by the guide RNAs were contacted with an RNA editing entity (e.g., a recombinant ADAR1 and/or ADAR2) for 30 minutes under conditions that allow for the editing of the regions targeted by the guide RNAs. The regions targeted by the guide RNAs were subsequently assessed for editing using next generation sequencing (NGS).

[0425] Libraries for screening of these longer engineered guides were generated as follows, and as summarized in FIG. 33: a candidate engineered guide library was procured having a construct with a T7 promoter, followed by the candidate engineered guide RNA sequence to be tested, followed by an Illumina R2 hairpin, followed by a sequence for a USER (Uracil-specific excision reagent) site Overlap. This library and the target sequence were PCR amplified, incorporating a deoxy-Uridine (dU) at the 3′ end of the constructs containing the candidate engineered guide RNA sequences and at the 5′ end of the target. Next, the PCR amplified library and target are incubated with the USER enzyme, resulting in nicking at the dU positions and ligation (using Taq ligase) of a given library construct containing the candidate engineered guide RNA sequence to the target sequence.

[0426] FIG. 34 shows a comparison of cell-free RNA editing using the methods and compositions described here versus in-cell RNA editing facilitated via the same engineered guide RNA sequence at various timepoints (1 min, 3 min, 10 min, 30 min, and 60 min). In this experiment, 40 candidate guide RNAs were screened. 50 nM ADAR1+100 nM ADAR2 was present in each cell. The editing values for each guide and the position of the adenosine that was edited is presented in FIG. 34 as a cumulative of 6 values. The open circles represent on target adenosine editing for each guide, whereas the black circles represent editing of adenosines other than the on-target adenosine (off target adenosines). As a whole, these data show that the cell-free high throughput screen is able to correlate well with in-cell RNA editing, in particular at certain timepoints (e.g., at 30 minutes).

[0427] FIG. 35 shows heatmaps of all self-annealing RNA structures tested for the 4 micro-footprints described above formed within varying placement of a barbell macro-footprint. The y-axis shows all engineered guide RNAs tested and the x-axis shows the target sequence positions, with position 0 representing the target adenosine to be edited.

[0428] Exemplary engineered guide RNAs from the high throughput screen of this example are described in TABLE 3. While the engineered guide RNA sequences in TABLE 3 are provided as DNA sequences with a T substituted for each U, the corresponding RNA sequences are also encompassed herein. The candidate engineered guide RNAs of TABLE 3 showed specific editing of the A nucleotide at position 6055 of the mRNA encoding the LRRK2 G2019S. Percent on-target editing is calculated by the following formula: the number of reads containing “G” at the target/the total number of reads. Specificity is calculated by the following formula: (percent on target editing+100)/(sum of off target editing percentage at selected off-targets sites+100). The addition of barbells produced specific editing patterns. In particular, the presence of barbell at position −14 and position +26 appeared to increase the specificity of ADAR editing. Thus, specificity can be improved significantly through the combination of micro-footprint structural features and macro-footprint structural features such as barbells.

TABLE 3
Exemplary Guide RNAs that target LRRK2_ mRNA

| SEQ ID | | | Structural Features | |
|---|---|---|---|---|
| NO | ID | Sequence | (target/guide) | Metrics |
| SEQ ID | LRRK2_ | CCCTGGTGTGCCC | 1/1 U/G wobble base pair at −3 | ADAR1 on target: 0.38% |
| NO: 118 | bnPCR_ | TCTGATGTTTTTA | position; | ADAR1 specificity: 0.5 |
| | ID94725_ | TCCCCATTCTACA | 1/1 A/C mismatch at 0 position; | ADAR2 on target: 0.64% |
| | count351__ | GCGGTACTGAGC | 2_2/2 symmetric bulge at position | ADAR2 specificity: 0.37 |
| | NoLoops_ | AAATCCGTGGTCA | +2 (CA-AU); | ADAR1/2 on target: |
| | gID_02513 | GCAATCTTTGCAA | 1/1 U-G wobble base pair at +15 | 0.6% |
| | | TGATGGCAGCATT | | ADAR1/2 specificity: |
| | | GGGATACAGTGT | | 0.43 |
| | | GAAGAGCAGCA | | |
| SEQ ID | LRRK2_ | CCCTGGTGTGCCC | 6/6_symmetric internal loop at | ADAR1 on target: 0.32% |
| NO: 119 | bnPCR_ | TCTGATGTTTTTT | −14_position (UGCAAA- | ADAR1 specificity: 0.77 |
| | ID94725_ | AGGGGATTCTAC | AAACGU); | ADAR2 on target: 0.7% |
| | count351__ | AGCGGTACTGAG | 1/1_U/G wobble base pair at −3 | ADAR2 specificity: 0.72 |
| | −14_26_ | CAAATCCGTGGTC | position; | ADAR1/2 on target: |
| | gID_08570 | AGCAATCAAACG | 1/1 A/C mismatch at 0 position; | 0.64% |
| | | TATGATGGCAGC | 2/2 CA/AU symmetric bulge at | ADAR1/2 specificity: |
| | | ATTGGGATACAGT | +2_position; | 0.74 |
| | | GTGAAGAGCAGC | 1/1_U/G wobble at +15 position; | |
| | | A | 6/6 symmetric internal loop at +26 | |
| | | | position (GGGGAU-UAGGGG) | |
| SEQ ID | LRRK2_ | CCCTGGTGTGCCC | 1/1 C/C mismatch at −4 position; | ADAR1 on target: 0.43% |
| NO: 120 | bnPCR_ | TCTGATGTTTTTA | 1/1 (U/G) wobble base pair at −3 | ADAR1 specificity: 0.54 |
| | ID79791_ | TCCCCATTCTACA | position; | ADAR2 on target: 0.69% |
| | count610__ | TCTGTAGTGAGCA | 1/1 A/C mismatch at 0 position; | ADAR2 specificity: 0.38 |
| | NoLoops_ | ATTCCGTGCTCAG | 1/1 C/U mismatch at +2 position; | ADAR1/2 on target: |
| | gID_06724 | CAATCTTTGCAAT | 1/1 G/G mismatch at +11 | 0.66% |
| | | GATGGCAGCATT | position; 1/1 U/U mismatch at | ADAR1/2 specificity: |
| | | GGGATACAGTGT | +15 position; 1/1 C/U mismatch | 0.42 |
| | | GAAGAGCAGCA | at +17 position | |
| SEQ ID | LRRK2_ | CCCTGGTGTGCCC | 6/6 symmetric internal loop at −14 | ADAR1 on target: 0.21% |
| NO: 121 | bnPCR_ | TCTGATGTTTTTT | position (UGCAAA-AAACGU); | ADAR1 specificity: 0.77 |
| | ID79791_ | AGGGGATTCTAC | 1/1 C/C mismatch at −4 position; | ADAR2 on target: 0.66% |
| | count610__ | ATCTGTAGTGAGC | 1/1 U/G wobble base pair at −3 | ADAR2 specificity: 0.71 |
| | −14_26_ | AATTCCGTGCTCA | position; | ADAR1/2 on target: |
| | gID_09469 | GCAATCAAACGT | 1/1 A/C mismatch at 0 position; | 0.62% |
| | | ATGATGGCAGCA | 1/1 C/U mismatch at +2 position; | ADAR1/2 specificity: |
| | | TTGGGATACAGTG | 1/1 G/G mismatch at +11 position; | 0.75 |
| | | TGAAGAGCAGCA | 1/1 U/U mismatch +15 position; | |
| | | | 1/1 C/U mismatch at +17 position; | |
| | | | 6/6 symmetric internal loop at +26 | |
| | | | position (GGGGAU-UAGGGG) | |
| SEQ ID | LRRK2_ | CCCTGGTGTGCCC | 1/1 C/C mismatch at −4 position; | ADAR1 on target: 0.45% |
| NO: 122 | bnPCR_ | TCTGATGTTTTTA | 1/1 A/C mismatch at 0 position; | ADAR1 specificity: 0.57 |
| | ID66010_ | TCCCCATTCTACA | 1/1 C/C mismatch at +2 position; | ADAR2 on target: 0.67% |
| | count1326__ | CCTGGACTGAGA | 1/1 G/A mismatch at +6 position; | ADAR2 specificity: 0.39 |
| | NoLoops_ | AATCCCGTACTCA | 3/3 symmetric bulge at +13 | ADAR1/2 on target: |
| | gID_09247 | GCAATCTTTGCAA | position (ACU-UGG); | 0.65% |
| | | TGATGGCAGCATT | 1/1 C/C mismatch at +17 position | ADAR1/2 specificity: |
| | | GGGATACAGTGT | | 0.42 |
| | | GAAGAGCAGCA | | |
| SEQ ID | LRRK2_ | CCCTGGTGTGCCC | 6/6 symmetric internal loop at −14 | ADAR1 on target: 0.29% |
| NO: 123 | bnPCR_ | TCTGATGTTTTTT | position (UGCAAA-AAACGU); | ADAR1 specificity: 0.8 |
| | ID66010_ | AGGGGATTCTAC | 1/1 C/C mismatch at −4 position; | ADAR2 on target: 0.64% |
| | count1326__ | ACCTGGACTGAG | 1/1 A/C mismatch at 0 position; | ADAR2 specificity: 0.71 |
| | −14_26_ | AAATCCCGTACTC | 1/1 C/C mismatch at +2 position; | ADAR1/2 on target: |
| | gID_11327 | AGCAATCAAACG | 1/1 G/A mismatch at +6 position; | 0.62% |
| | | TATGATGGCAGC | 3/3 symmetric bulge at +13 | ADAR1/2 specificity: |
| | | ATTGGGATACAGT | position (ACU-UGG); | 0.76 |
| | | GTGAAGAGCAGC | 1/1 C/C mismatch at +17 position; | |
| | | A | 6/6_symmetric internal loop at +26 | |
| | | | position (GGGGAU-UAGGGG) | |
| SEQ ID | LRRK2_ | CCCTGGTGTGCCC | 1/1 U/G wobble base pair at −3 | ADAR1 on target: 0.5% |
| NO: 124 | bnPCR_ | TCTGATGTTTTTA | position; | ADAR1 specificity: 0.52 |
| | ID50437_ | TCCCCATTCTACA | 1/1 A/C mismatch at 0 position; | ADAR2 on target: 0.7% |
| | count708__ | GCAGTACGGTGC | 1/1 U/G wobble base pair at +4 | ADAR2 specificity: 0.38 |
| | NoLoops_ | AGTGCCGTGGTCA | position; | ADAR1/2 on target: |
| | gID_11520 | GCAATCTTTGCAA | 1/1 U/U mismatch at +8 position; | 0.65% |
| | | TGATGGCAGCATT | 1/1 A/G mismatch at +10 position | ADAR1/2 specificity: |
| | | GGGATACAGTGT | | 0.43 |
| | | GAAGAGCAGCA | | |
| SEQ ID | LRRK2_ | CCCTGGTGTGCCC | 6/6 symmetric internal loop at −14 | ADAR1 on target: 0.36% |
| NO: 125 | bnPCR_ | TCTGATGTTTTTT | position (UGCAAA-AAACGU); | ADAR1 specificity: 0.76 |
| | ID50437_ | AGGGGATTCTAC | 1/1 U/G wobble at −3 position; | ADAR2 on target: 0.68% |
| | count7081__ | AGCAGTACGGTG | 1/1 A/C mismatch at 0 position; | ADAR2 specificity: 0.68 |
| | −14_26_ | CAGTGCCGTGGTC | 1/1 U/G wobble base pair at +4 | ADAR1/2 on target: |
| | gID_09857 | AGCAATCAAACG | position; | 0.69% |
| | | TATGATGGCAGC | 1/1 U/U mismatch at +8 position; | ADAR1/2 specificity: |
| | | ATTGGGATACAGT | 1/1 A/G mismatch at +10 position; | 0.71 |
| | | GTGAAGAGCAGC | 6/6 symmetric internal loop at +26 | |
| | | A | position (GGGGAU-UAGGGG) | |
| SEQ ID | LRRK2_ | CCCTGGTGTGCCC | 1/1 U/G wobble base pair at −3 | ADAR1 on target: 0.4% |
| NO: 126 | bnPCR_ | TCTGATGTTTTTA | position; | ADAR1 specificity: 0.56 |
| | ID41799_ | TCCCCCTTCTACA | 1/1 A/C mismatch at 0 position; | ADAR2 on target: 0.69% |
| | count730__ | GCAGTAGTGAGTT | 2/2 symmetric bulge at +4 position | ADAR2 specificity: 0.37 |
| | NoLoops_ | TTGCCGTGGTCAG | (UU-UU); | ADAR1/2 on target: |
| | gID_04947 | CAATCTTTGCAAT | 1/1 G/U wobble base pair at +6 | 0.66% |
| | | GATGGCAGCATT | position; | ADAR1/2 specificity: |
| | | GGGATACAGTGT | 1/1 G/G mismatch at +11 position; | 0.41 |
| | | GAAGAGCAGCA | 1/1 U/C mismatch at +25 position | |
| SEQ ID | LRRK2_ | CCCTGGTGTGCCC | 6/6 symmetric internal loop at | ADAR1 on target: 0.3% |
| NO: 127 | bnPCR_ | TCTGATGTTTTTT | −14_position (UGCAAA- | ADAR1 specificity: 0.79 |
| | | AGGGGCTTCTACA | AAACGU); | ADAR2 on target: 0.68% |
| | ID41799_ | GCAGTAGTGAGTT | 1/1 U/G wobble base pair at −3 | ADAR2 specificity: 0.67 |
| | count7301__ | TTGCCGTGGTCAG | position; | ADAR1/2 on target: |
| | −14_26_ | CAATCAAACGTAT | 1/1 A/C mismatch at 0 position; | 0.65% |
| | gID_07755 | GATGGCAGCATT | 2/2 symmetric bulge at +4 position | ADAR1/2 specificity: |
| | | GGGATACAGTGT | (UU-UU);_ | 0.73 |
| | | GAAGAGCAGCA | 1/1 G/U wobble base pair at +6 | |
| | | | position; | |
| | | | 1/1 G/G mismatch at +11 position; | |
| | | | 7/7 symmetric internal loop at +25 | |
| | | | position (UGGGGAU- | |
| | | | UAGGGGC) | |
| SEQ ID | LRRK2_ | CCCTGGTGTGCCC | 1/1 C/A mismatch at −4 position; | ADAR1 on target: 0.45% |
| NO: 128 | bnPCR_ | TCTGATGTTTTTA | 1/1 U/G wobble base pair at −3 | ADAR1 specificity: 0.57 |
| | ID35277_ | TCCCCATTCTACA | position; | ADAR2 on target: 0.66% |
| | count295__ | GCAGTCCTGTACA | 1/1 A/C mismatch at 0 position; | ADAR2 specificity: 0.39 |
| | NoLoops_ | GTGCCGTGATCAG | 1/1 U/G wobble base pair at +4 | ADAR1/2 on target: |
| | gID_06840 | CAATCTTTGCAAT | position; | 0.64% |
| | | GATGGCAGCATT | 2/2 symmetric bulge at +7 position | ADAR1/2 specificity: |
| | | GGGATACAGTGT | (CU-UA); | 0.44 |
| | | GAAGAGCAGCA | 1/1 U/C mismatch at +12 position | |
| SEQ ID | LRRK2_ | CCCTGGTGTGCCC | 6/6 symmetric internal loop at −14 | ADAR1 on target: 0.27% |
| NO: 129 | bnPCR_ | TCTGATGTTTTTT | position (UGCAAA-AAACGU); | ADAR1 specificity: 0.76 |
| | ID35277_ | AGGGGATTCTAC | 1/1 C/A mismatch at −4 position; | ADAR2 on target: 0.68% |
| | count295__ | AGCAGTCCTGTAC | 1/1 U/G wobble base pair at −3 | ADAR2 specificity: 0.68 |
| | −14_26_ | AGTGCCGTGATCA | position; | ADAR1/2 on target: |
| | gID_09359 | GCAATCAAACGT | 1/1 A/C mismatch at 0 position; | 0.65% |
| | | ATGATGGCAGCA | 1/1 U/G wobble base pair at +4 | ADAR1/2 specificity: |
| | | TTGGGATACAGTG | position; | 0.71 |
| | | TGAAGAGCAGCA | 2/2 symmetric bulge at +7 position | |
| | | | (CU-UA); | |
| | | | 1/1 U/C mismatch at +12 position; | |
| | | | 6/6 symmetric internal loop at +26 | |
| | | | position (GGGGAU-UAGGGG | |
| SEQ ID | LRRK2_ | CCCTGGTGTGCCC | 6/6 symmetric internal loop at −10 | ADAR1 on target: 0.33% |
| NO: 130 | bnPCR_ | TCTGATGTTTTTA | position (AAGAUU-CUAGGC); | ADAR1 specificity: 0.7 |
| | ID34601_ | TCCCCATTCGCCT | 1/1 G/U wobble base pair at −6 | ADAR2 on target: 0.63% |
| | count2108__ | GAGGTACTGACC | position; | ADAR2 specificity: 0.52 |
| | −10_16_ | AATCCCGTAGTTA | 1/1 A/C mismatch at 0 position; | ADAR1/2 on target: |
| | gID_01444 | GCCTAGGCTGCA | 1/1 C/C mismatch at +2 position; | 0.6% |
| | | ATGATGGCAGCA | 1/1 C/C mismatch at +7 position; | ADAR1/2 specificity: |
| | | TTGGGATACAGTG | 1/1 U/G wobble base pair at +15 | 0.58 |
| | | TGAAGAGCAGCA | position; | |
| | | | 6/6 symmetric internal loop at +16 | |
| | | | position (GCUGUA-GCCUGA) | |
| SEQ ID | LRRK2_ | CCCTGGTGTGCCC | 6/6 symmetric internal loop at −22 | ADAR1 on target: 0.22% |
| NO: 131 | bnPCR_ | TCTGATGTTTTTC | position (GCCAUC-AACCUG); | ADAR1 specificity: 0.73 |
| | ID33405_ | TACAGATTCTACA | 1/1 C/C mismatch at −8 position; | ADAR2 on target: 0.61% |
| | count860__ | GCAGTACAGAGG | 1/1 U/G wobble base pair at −3 | ADAR2 specificity: 0.56 |
| | −22_26_ | ACTGCCGAGGTC | position; | ADAR1/2 on target: |
| | gID_00318 | ACCAATCTTTGCA | 1/1 A/A mismatch at −2 position; | 0.56% |
| | | ATAACCTGAGCAT | 1/1 A/C mismatch at 0 position; | ADAR1/2 specificity: |
| | | TGGGATACAGTGT | 1/1 U/C mismatch at +4 position; | 0.63 |
| | | GAAGAGCAGCA | 1/1 G/G mismatch at +6 position; | |
| | | | 1/1 A/A mismatch at +10 position; | |
| | | | 2/2 symmetric bulge at +26 | |
| | | | position (GG-AG); | |
| | | | 3/3 symmetric bulge at +29 | |
| | | | position (GAU-CUA) | |
| SEQ ID | LRRK2_ | CCCTGGTGTGCCC | 6/6 symmetric internal loop at −20 | ADAR1 on target: 0.22% |
| NO: 132 | bnPCR_ | TCTGATGTTTTTT | position (CAUCAU-UACUAC); | ADAR1 specificity: 0.73 |
| | ID33405_ | AGGGGATTCTAC | 1/1 C/C mismatch at −8 position; | ADAR2 on target: 0.63% |
| | count860__ | AGCAGTACAGAG | 1/1 U/G wobble base pair at −3 | ADAR2 specificity: 0.58 |
| | −20_26_ | GACTGCCGAGGT | position; | ADAR1/2 on target: |
| | gID_09192 | CACCAATCTTTGC | 1/1 A/A mismatch at −2 position; | 0.58% |
| | | ATACTACGCAGC | 1/1 A/C mismatch at 0 position; | ADAR1/2 specificity: |
| | | ATTGGGATACAGT | 1/1 U/C mismatch at +4 position; | 0.64 |
| | | GTGAAGAGCAGC | 1/1 G/G mismatch at +6 position; | |
| | | A | 1/1 A/A mismatch at +10 position; | |
| | | | 6/6 symmetric internal loop at | |
| | | | +26 position (GGGGAU- | |
| | | | UAGGGG) | |
| SEQ ID | LRRK2_ | CCCTGGTGTGCCC | 6/6 symmetric internal loop at −16 | ADAR1 on target: 0.21% |
| NO: 133 | bnPCR_ | TCTGATGTTTTTC | position (AUUGCA-GUCUAG); | ADAR1 specificity: 0.76 |
| | ID33405_ | GGGAGATTCTAC | 1/1 C/C mismatch at −8 position; | ADAR2 on target: 0.66% |
| | count860__ | AGCAGTACAGAG | 1/1 U/G wobble at −3 position; | ADAR2 specificity: 0.6 |
| | −16_26_ | GACTGCCGAGGT | 1/1 A/A mismatch at −2 position; | ADAR1/2 on target: |
| | gID_11898 | CACCAATCTTGTC | 1/1 A/C mismatch at 0 position; | 0.59% |
| | | TAGGATGGCAGC | 1/1 U/C mismatch at +4 position; | ADAR1/2 specificity: |
| | | ATTGGGATACAGT | 1/1 G/G mismatch at +6 position; | 0.63 |
| | | GTGAAGAGCAGC | 1/1 A/A mismatch at +10 position; | |
| | | A | 6/6 symmetric internal loop at | |
| | | | +26 position (GGGGAU- | |
| | | | CGGGAG) | |
| SEQ ID | LRRK2_ | CCCTGGTGTGCCC | 6/6 symmetric internal loop at −12 | ADAR1 on target: 0.39% |
| NO: 134 | bnPCR_ | TCTGATGTATGTT | position (CAAAGA-CGCUAA); | ADAR1 specificity: 0.75 |
| | ID33405_ | CCCCCATTCTACA | 1/1 C/C mismatch at −8 position; | ADAR2 on target: 0.45% |
| | count860__ | GCAGTACAGAGG | 1/1 U/G wobble base pair at −3 | ADAR2 specificity: 0.55 |
| | −12_30_ | ACTGCCGAGGTC | position; | ADAR1/2 on target: |
| | gID_05698 | ACCAACGCTAAC | 1/1 A/A mismatch at −2 position; | 0.5% |
| | | AATGATGGCAGC | 1/1 A/C mismatch at 0 position; | ADAR1/2 specificity: |
| | | ATTGGGATACAGT | 1/1 U/C mismatch at +4 position; | 0.66 |
| | | GTGAAGAGCAGC | 1/1 G/G mismatch at +6 position; | |
| | | A | 1/1 A/A mismatch at +10 position; | |
| | | | 4/4 symmetric bulge at +30 | |
| | | | position (AUAA-GUUC); | |
| | | | 1/1 A/A mismatch at +35 position | |
| SEQ ID | LRRK2_ | CCCTGGTGTGCCC | 6/6 symmetric internal loop at −8 | ADAR1 on target: 0.33% |
| NO: 135 | bnPCR_ | TCTGATGTTTTTA | position (GAUUGC-CUUUGA); | ADAR1 specificity: 0.67 |
| | ID33405_ | TGGAAAGTCTAC | 1/1 U/G wobble base pair at −3 | ADAR2 on target: 0.58% |
| | count860__ | AGCAGTACAGAG | position; | ADAR2 specificity: 0.58 |
| | −8_24_ | GACTGCCGAGGT | 1/1 A/A mismatch at −2 position; | ADAR1/2 on target: |
| | gID_05952 | CACTTTGATTTGC | 1/1 A/C mismatch at 0 position; | 0.49% |
| | | AATGATGGCAGC | 1/1 U/C mismatch at +4 position; | ADAR1/2 specificity: |
| | | ATTGGGATACAGT | 1/1 G/G mismatch at +6 position; | 0.64 |
| | | GTGAAGAGCAGC | 1/1 A/A mismatch at +10 position; | |
| | | A | 6/6 symmetric internal loop at +24 | |
| | | | position (AUGGGG-GGAAAG) | |
| SEQ ID | LRRK2_ | CCCTGGTGTGCCC | 6/6 symmetric internal loop at −22 | ADAR1 on target: 0.25% |
| NO: 136 | bnPCR_ | TCTGATGTTTTTC | position (GCCAUC-CAAAAA); | ADAR1 specificity: 0.72 |
| | ID29209_ | GAAGAATTCTAC | 1/1 U/G wobble base pair at −7 | ADAR2 on target: 0.59% |
| | count871__ | AGTAGGACTGAG | position; | ADAR2 specificity: 0.61 |
| | −22_26_ | CACTGCCGAGCTG | 1/1 G/G mismatch at −6 position; | ADAR1/2 on target: |
| | gID_01244 | GGCAATCTTTGCA | 0/1 asymmetric bulge at −4 position | 0.56% |
| | | ATCAAAAAAGCA | (-C); | ADAR1/2 specificity: |
| | | TTGGGATACAGTG | 1/0 asymmetric bulge at −2 position | 0.67 |
| | | TGAAGAGCAGCA | (A-); | |
| | | | 1/1 A/C mismatch at 0 position; | |
| | | | 1/1 U/C mismatch at +4 position; | |
| | | | 1/1 A/G mismatch at +13 position; | |
| | | | 1/1 G/U wobble at +16 position; | |
| | | | 6/6 symmetric internal loop at +26 | |
| | | | position (GGGGAU-CGAAGA) | |
| SEQ ID | LRRK2_ | CCCTGGTGTGCCC | 6/6 symmetric internal loop at −20 | ADAR1 on target: 0.25% |
| NO: 137 | bnPCR_ | TCTGATGTTTTTT | position (CAUCAU-UACUAC); | ADAR1 specificity: 0.73 |
| | ID29209_ | AGGGGATTCTAC | 1/1 U/G wobble base pair at −7 | ADAR2 on target: 0.62% |
| | count871__ | AGTAGGACTGAG | position; | ADAR2 specificity: 0.67 |
| | −20_26_ | CACTGCCGAGCTG | 1/1 G/G mismatch at −6 position; | ADAR1/2 on target: |
| | gID_07422 | GGCAATCTTTGCA | 0/1 asymmetric bulge at −4 position | 0.6% |
| | | TACTACGCAGCAT | (-C); | ADAR1/2 specificity: |
| | | TGGGATACAGTGT | 1/0 asymmetric bulge at −2 position | 0.69 |
| | | GAAGAGCAGCA | (A-); | |
| | | | 1/1 A/C mismatch at 0 position; | |
| | | | 1/1 U/C mismatch at +4 position; | |
| | | | 1/1 A/G mismatch at +13 position; | |
| | | | 1/1 G/U wobble base pair at +16 | |
| | | | position; | |
| | | | 6/6 symmetric internal loop at +26 | |
| | | | position (GGGGAU-UAGGGG) | |
| SEQ ID | LRRK2_ | CCCTGGTGTGCCC | 6/6 symmetric internal loop at −16 | ADAR1 on target: 0.32% |
| NO: 138 | bnPCR_ | TCTGATGTTTTTC | position (AUUGCA-CAUUUG); | ADAR1 specificity: 0.77 |
| | ID29209_ | TACAGATTCTACA | 1/1 U/G wobble base pair at −7 | ADAR2 on target: 0.6% |
| | count8711__ | GTAGGACTGAGC | position; | ADAR2 specificity: 0.66 |
| | −16_26_ | ACTGCCGAGCTG | 1/1 G/G mismatch at −6 position; | ADAR1/2 on target: |
| | gID_01312 | GGCAATCTTCATT | 0/1 aysmmetric bulge at −4 position | 0.57% |
| | | TGGATGGCAGCA | (-C); | ADAR1/2 specificity: |
| | | TTGGGATACAGTG | 1/0 asymmetric bulge at −2 position | 0.69 |
| | | TGAAGAGCAGCA | (A-); | |
| | | | 1/1 A/C mismatch at 0 position; | |
| | | | 1/1 U/C mismatch at +4 position; | |
| | | | 1/1 A/G mismatch at +13 position; | |
| | | | 1/1 G/U wobble base pair at +16 | |
| | | | position; | |
| | | | 2/2 symmetric bulge at +26 | |
| | | | position (GG-AG); | |
| | | | 3/3 symmetric bulge at +29 | |
| | | | position (GAU-CUA) | |
| SEQ ID | LRRK2_ | CCCTGGTGTGCCC | 6/6 symmetric internal loop at −16 | ADAR1 on target: 0.28% |
| NO: 139 | bnPCR_ | TCTGATGTTTTTA | position (AUUGCA-GAGUCG); | ADAR1 specificity: 0.81 |
| | ID29209_ | TGGGGTGTCTACA | 1/1 U/G wobble base pair at −7 | ADAR2 on target: 0.62% |
| | count871__ | GTAGGACTGAGC | position; | ADAR2 specificity: 0.73 |
| | −16_24_ | ACTGCCGAGCTG | 1/1 G/G mismatch at −6 position; | ADAR1/2 on target: |
| | gID_00727 | GGCAATCTTGAGT | 0/1 asymmetric bulge at −4 position | 0.58% |
| | | CGGATGGCAGCA | (-C); | ADAR1/2 specificity: |
| | | TTGGGATACAGTG | 1/0 asymmetric bulge at −2 position | 0.76 |
| | | TGAAGAGCAGCA | (A-); | |
| | | | 1/1 A/C mismatch at 0 position; | |
| | | | 1/1 U/C mismatch at +4 position; | |
| | | | 1/1 A/G mismatch at +13 position; | |
| | | | 1/1 G/U wobble at +16 position; | |
| | | | 6/6 symmetric internal loop at | |
| | | | +24 position (AUGGGG- | |
| | | | GGGGUG) | |
| SEQ ID | LRRK2_ | CCCTGGTGTGCCC | 6/6 symmetric internal loop at −16 | ADAR1 on target: 0.2% |
| NO: 140 | bnPCR_ | TCTGATGTTTTTA | position (AUUGCA-CUCCCA); | ADAR1 specificity: 0.81 |
| | ID29209_ | TCCGAAACATAC | 1/1 U/G wobble at −7 position; | ADAR2 on target: 0.55% |
| | count871__ | AGTAGGACTGAG | 1/1 G/G mismatch at −6 positon; | ADAR2 specificity: 0.74 |
| | −16_22_ | CACTGCCGAGCTG | 0/1 asymmetric bulge at −4 position | ADAR1/2 on target: |
| | gID_11427 | GGCAATCTTCTCC | (-C); | 0.48% |
| | | CAGATGGCAGCA | 1/0 asymmetric bulge at −2 position | ADAR1/2 specificity: |
| | | TTGGGATACAGTG | (A-); | 0.75 |
| | | TGAAGAGCAGCA | 1/1 A/C mismatch at 0 position; | |
| | | | 1/1 U/C mismatch at +4 position; | |
| | | | 1/1 A/G mismatch at +13 position; | |
| | | | 1/1 G/U wobble base pair at +16 | |
| | | | position; | |
| | | | 6/6 symmetric internal loop at +22 | |
| | | | position (GAAUGG-GAAACA) | |
| SEQ ID | LRRK2_ | CCCTGGTGTGCCC | 6/6 symmetric internal loop at −10 | ADAR1 on target: 0.45% |
| NO: 141 | bnPCR_ | TCTGATGTTTTTC | position (AAGAUU-CUCAGG); | ADAR1 specificity: 0.78 |
| | ID29209_ | ATGAGATTCTACA | 1/1 U/G wobble base pair at −7 | ADAR2 on target: 0.64% |
| | count871__ | GTAGGACTGAGC | position; | ADAR2 specificity: 0.7 |
| | −10_26_ | ACTGCCGAGCTG | 1/1 G/G mismatch at −6 position; | ADAR1/2 on target: |
| | gID_00091 | GGCCTCAGGTGC | 0/1 asymmetric bulge at −4 position | 0.59% |
| | | AATGATGGCAGC | (-C); | ADAR1/2 specificity: |
| | | ATTGGGATACAGT | 1/0 asymmetric bulge at −2 position | 0.73 |
| | | GTGAAGAGCAGC | (A-); | |
| | | A | 1/1 A/C mismatch at 0 position; | |
| | | | 1/1 U/C mismatch at +4 position; | |
| | | | 1/1 A/G mismatch at +13 position; | |
| | | | 1/1 G/U wobble base pair at +16 | |
| | | | position; | |
| | | | 6/6 symmetric internal loop at +26 | |
| | | | position (GGGGAU-CAUGAG) | |
| SEQ ID | LRRK2_ | CCCTGGTGTGCCC | 4/4 symmetric bulge at −9 position | ADAR1 on target: 0.38% |
| NO: 142 | bnPCR_ | TCTGATGTTTTTT | (AUUG-GUUC); | ADAR1 specificity: 0.74 |
| | ID29209_ | ACAGAATTCTACA | 1/1 U/G wobble base pair at −7 | ADAR2 on target: 0.57% |
| | count871__ | GTAGGACTGAGC | position; | ADAR2 specificity: 0.65 |
| | −8_26_ | ACTGCCGAGCTG | 1/1 G/G mismatch at −6 position; | ADAR1/2 on target: |
| | gID_11298 | GGGTTCCTTTGCA | 0/1 asymmetric bulge at −4 position | 0.53% |
| | | ATGATGGCAGCA | (-C); | ADAR1/2 specificity: |
| | | TTGGGATACAGTG | 1/0 asymmetric bulge at −2 position | 0.71 |
| | | TGAAGAGCAGCA | (A-); | |
| | | | 1/1 A/C mismatch at 0 position; | |
| | | | 1/1 U/C mismatch at +4 position; | |
| | | | 1/1 A/G mismatch at +13 position; | |
| | | | 1/1 G/U wobble base pair at +16 | |
| | | | position; | |
| | | | 6/6 symmetric internal loop at +26 | |
| | | | position (GGGGAU-UACAGA) | |
| SEQ ID | LRRK2_ | CCCTGGTGTGCCC | 6/6 symmetric internal loop at −20 | ADAR1 on target: 0.39% |
| NO: 143 | bnPCR_ | TCTGATGTTTTTT | position (CAUCAU-UACUAC); | ADAR1 specificity: 0.71 |
| | ID28134_ | AGGGGATTCTACC | 1/1 A/C mismatch at 0 position; | ADAR2 on target: 0.7% |
| | count1700__ | GCAGTACTACCCG | 1/1 C/C mismatch at +2 position; | ADAR2 specificity: 0.64 |
| | −20_26_ | ATCCCGTAGTCAG | 1/1 U/G wobble base pair at +5 | ADAR1/2 on target: |
| | gID_06283 | CAATCTTTGCATA | position; | 0.56% |
| | | CTACGCAGCATTG | 3/3 symmetric bulge at +7 position | ADAR1/2 specificity: 0.7 |
| | | GGATACAGTGTG | (CUC-ACC); | |
| | | AAGAGCAGCA | 1/1 U/C mismatch at +18 position; | |
| | | | 6/6 symmetric internal loop at +26 | |
| | | | position (GGGGAU-UAGGGG) | |
| SEQ ID | LRRK2_ | CCCTGGTGTGCCC | 1/1 U/G wobble base pair at −7 | ADAR1 on target: 0.44% |
| NO: 144 | bnPCR_ | TCTGATGTTTTTA | position; | ADAR1 specificity: 0.65 |
| | ID24310_ | TCCCCATTCTAGG | 1/1 G/G mismatch at −6 position; | ADAR2 on target: 0.7% |
| | count1321__ | GCAGTAGGGTGC | 1/1 U/G wobble base pair at −3 | ADAR2 specificity: 0.39 |
| | NoLoops_ | ACTGCCGTGGTGG | position; | ADAR1/2 on target: |
| | gID_11060 | GCAATCTTTGCAA | 1/1 A/C mismatch at 0 position; | 0.68% |
| | | TGATGGCAGCATT | 1/1 U/C mismatch at +4 position; | ADAR1/2 specificity: |
| | | GGGATACAGTGT | 1/1 U/U mismatch at +8 position; | 0.46 |
| | | GAAGAGCAGCA | 2/2 symmetric bulge at +10 | |
| | | | position (AG-GG); | |
| | | | 1/1 U/G wobble base pair at +18 | |
| | | | position; | |
| | | | 1/1 G/G mismatch at +19 position | |
| SEQ ID | LRRK2_ | CCCTGGTGTGCCC | 6/6 symmetric internal loop at −14 | ADAR1 on target: 0.15% |
| NO: 145 | bnPCR_ | TCTGATGTTTTTT | position (UGCAAA-AAACGU); | ADAR1 specificity: 0.82 |
| | ID24310_ | AGGGGATTCTAG | 1/1 U/G wobble base pair at −7 | ADAR2 on target: 0.67% |
| | count1321__ | GGCAGTAGGGTG | position; | ADAR2 specificity: 0.72 |
| | −14_26_ | CACTGCCGTGGTG | 1/1 G/G mismatch at −6 position; | ADAR1/2 on target: |
| | gID_02264 | GGCAATCAAACG | 1/1 U/G wobble base pair at −3 | 0.64% |
| | | TATGATGGCAGC | position; | ADAR1/2 specificity: |
| | | ATTGGGATACAGT | 1/1 A/C mismatch at 0 position; | 0.75 |
| | | GTGAAGAGCAGC | 1/1 U/C mismatch at +4 position; | |
| | | A | 1/1 U/U mismatch at +8 position; | |
| | | | 2/2 symmetric bulge at +10 | |
| | | | position (AG-GG); | |
| | | | 1/1 U/G wobble at +18 position; | |
| | | | 1/1 G/G mismatch at +19 position; | |
| | | | 6/6 symmetric internal loop at +26 | |
| | | | position (GGGGAU-UAGGGG) | |
| SEQ ID | LRRK2_ | CCCTGGTGTGCCC | 1/1 U/G wobble base pair at −3 | ADAR1 on target: 0.56% |
| NO: 146 | bnPCR_ | TCTGATGTTTTTA | position; | ADAR1 specificity: 0.59 |
| | ID23393_ | TCCCCATTCTACC | 1/1 A/C mismatch at 0 position; | ADAR2 on target: 0.69% |
| | count2397__ | GCTGTGCTGGGCA | 1/1 C/C mismatch at +2 position; | ADAR2 specificity: 0.41 |
| | NoLoops_ | ATCCCGTGGTCAG | 1/1 U/G wobble base pair at +8 | ADAR1/2 on target: |
| | gID_09625 | CAATCTTTGCAAT | position; | 0.67% |
| | | GATGGCAGCATT | 1/1 U/G wobble base pair at +12 | ADAR1/2 specificity: |
| | | GGGATACAGTGT | position; | 0.45 |
| | | GAAGAGCAGCA | 1/1 U/U mismatch at +15 position; | |
| | | | 1/1 U/C mismatch at +18 position | |
| SEQ ID | LRRK2_ | CCCTGGTGTGCCC | 6/6 symmetric internal loop at −20 | ADAR1 on target: 0.41% |
| NO: 147 | bnPCR_ | TCTGATGTTTTTT | position (CAUCAU-UACUAC); | ADAR1 specificity: 0.67 |
| | ID23393_ | AGGGGATTCTACC | 1/1 U/G wobble base pair at −3 | ADAR2 on target: 0.64% |
| | count2397__ | GCTGTGCTGGGCA | position; | ADAR2 specificity: 0.7 |
| | 2-0_26_ | ATCCCGTGGTCAG | 1/1 A/C mismatch at 0 position; | ADAR1/2 on target: |
| | gID_06774 | CAATCTTTGCATA | 1/1 C/C mismatch at +2 position; | 0.63% |
| | | CTACGCAGCATTG | 1/1 U/G wobble base pair at +8 | ADAR1/2 specificity: |
| | | GGATACAGTGTG | position; | 0.73 |
| | | AAGAGCAGCA | 1/1 U/G wobble base pair at +12 | |
| | | | position; | |
| | | | 1/1 U/U mismatch at +15 position; | |
| | | | 1/1 U/C mismatch at +18 position; | |
| | | | 6/6 symmetric internal loop at +26 | |
| | | | position (GGGGAU-UAGGGG) | |
| SEQ ID | LRRK2_ | CCCTGGTGTGCCC | 6/6 symmetric internal loop at −14 | ADAR1 on target: 0.39% |
| NO: 148 | bnPCR_ | TCTGATGTTTTTT | position (UGCAAA-AAACGU); | ADAR1 specificity: 0.83 |
| | ID23393_ | AGGGGATTCTACC | 1/1 U/G wobble base pair at −3 | ADAR2 on target: 0.67% |
| | count2397__ | GCTGTGCTGGGCA | position; | ADAR2 specificity: 0.75 |
| | −14_26_ | ATCCCGTGGTCAG | 1/1 A/C mismatch at 0 position; | ADAR1/2 on target: |
| | gID_06456 | CAATCAAACGTAT | 1/1 C/C mismatch at +2 position; | 0.62% |
| | | GATGGCAGCATT | 1/1 U/G wobble base pair at +8 | ADAR1/2 specificity: |
| | | GGGATACAGTGT | position; | 0.75 |
| | | GAAGAGCAGCA | 1/1 U/G wobble base pair at +12 | |
| | | | position; | |
| | | | 1/1 U/G mismatch at +15 position; | |
| | | | 1/1 U/C mismatch at +18 position; | |
| | | | 6/6 symmetric internal loop at +26 | |
| | | | position (GGGGAU-UAGGGG) | |
| SEQ ID | LRRK2_ | CCCTGGTGTGCCC | 1/1 U/G wobble at −3 position; | ADAR1 on target: 0.48% |
| NO: 149 | bnPCR_ | TCTGATGTTTTTA | 1/1 A/C mismatch at 0 position; | ADAR1 specificity: 0.5 |
| | ID22759_ | TCCCCATTCTACA | 1/1 U/G wobble base pair at +4 | ADAR2 on target: 0.68% |
| | count1590__ | ACAGTACGGTGA | position; | ADAR2 specificity: 0.43 |
| | NoLoops_ | AGTGCCGTGGTCA | 5/5 symmetric internal loop at +6 | ADAR1/2 on target: |
| | gID_06335 | GCAATCTTTGCAA | position (GCUCA-GGUGA); | 0.62% |
| | | TGATGGCAGCATT | 1/1 C/A mismatch at +17 position | ADAR1/2 specificity: |
| | | GGGATACAGTGT | | 0.46 |
| | | GAAGAGCAGCA | | |
| SEQ ID | LRRK2_ | CCCTGGTGTGCCC | 6/6 symmetric internal loop at −14 | ADAR1 on target: 0.28% |
| NO: 150 | bnPCR_ | TCTGATGTTTTTT | position (UGCAAA-AAACGU); | ADAR1 specificity: 0.77 |
| | ID22759_ | AGGGGATTCTAC | 1/1 U/G wobble base pair at −3 | ADAR2 on target: 0.68% |
| | count1590__ | AACAGTACGGTG | position; | ADAR2 specificity: 0.74 |
| | −14_26_ | AAGTGCCGTGGTC | 1/1 A/C mismatch at 0 position; | ADAR1/2 on target: |
| | gID_08476 | AGCAATCAAACG | 1/1 U/G wobble base pair at +4 | 0.66% |
| | | TATGATGGCAGC | position; | ADAR1/2 specificity: |
| | | ATTGGGATACAGT | 5/5 symmetric internal loop at +6 | 0.77 |
| | | GTGAAGAGCAGC | position (GCUCA-GGUGA); | |
| | | A | 1/1 C/A mismatch at +17 position; | |
| | | | 6/6 symmetric internal loop at +26 | |
| | | | position (GGGGAU-UAGGGG) | |
| SEQ ID | LRRK2_ | CCCTGGTGTGCCC | 9/9 symmetric internal loop at −19 | ADAR1 on target: 0.43% |
| NO: 151 | bnPCR_ | TCTGATGTTTTTC | position (GCCAUCAUU- | ADAR1 specificity: 0.74 |
| | ID22357_ | TAGATATTCTACG | CAUUAUUUG); | ADAR2 on target: 0.64% |
| | count844__ | GCAGTTCATAGCA | 1/1 C/A mismatch at −8 position; | ADAR2 specificity: 0.5 |
| | −22_26_ | ATCCCGTAGTCAA | 1/1 A/C mismatch at 0 position; | ADAR1/2 on target: |
| | gID_02673 | CAATCTTTGCCAT | 1/1 C/C mismatch at +2 position; | 0.52% |
| | | TATTTGAGCATTG | 2/2 symmetric bulge at +9 position | ADAR1/2 specificity: |
| | | GGATACAGTGTG | (CA-AU); | 0.57 |
| | | AAGAGCAGCA | 1/1 U/G mismatch at +12 position; | |
| | | | 1/1 U/G wobble base pair at +18 | |
| | | | position; | |
| | | | 1/1 G/U wobble base pair at +26 | |
| | | | position; | |
| | | | 5/5 symmetric internal loop at +27 | |
| | | | position (GGGAU-CUAGA) | |
| SEQ ID | LRRK2_ | CCCTGGTGTGCCC | 8/8 symmetric internal loop at −12 | ADAR1 on target: 0.4% |
| NO: 152 | bnPCR_ | TCTGATGTTTTTC | position (UGCAAAGA- | ADAR1 specificity: 0.82 |
| | ID22357_ | GGAGGATTCTAC | GGGUCCCC); | ADAR2 on target: 0.52% |
| | count844__ | GGCAGTTCATAGC | 1/1 C/A mismatch at −8 position; | ADAR2 specificity: 0.71 |
| | −12_26_ | AATCCCGTAGTCA | 1/1 A/C mismatch at 0 position; | ADAR1/2 on target: |
| | gID_07465 | ACAAGGGTCCCC | 1/1 C/C mismatch at +2 position; | 0.48% |
| | | ATGATGGCAGCA | 2/2 symmetric bulge at +9 position | ADAR1/2 specificity: |
| | | TTGGGATACAGTG | (CA-AU); | 0.74 |
| | | TGAAGAGCAGCA | 1/1 U/U mismatch at +12 position; | |
| | | | 1/1 U/G wobble base pair at +18 | |
| | | | position; | |
| | | | 6/6 symmetric internal loop at +26 | |
| | | | position (GGGGAU-CGGAGG) | |
| SEQ ID | LRRK2_ | CCCTGGTGTGCCC | 8/8 symmetric internal loop at −12 | ADAR1 on target: 0.3% |
| NO: 153 | bnPCR_ | TCTGATGTTTTTA | position (UGCAAAGA- | ADAR1 specificity: 0.79 |
| | ID22357_ | TCCCCATCACCCT | CAAUAUCC); | ADAR2 on target: 0.68% |
| | count844__ | GCAGTTCATAGCA | 1/1 C/A mismatch at −8 position; | ADAR2 specificity: 0.67 |
| | −12_18_ | ATCCCGTAGTCAA | 1/1 A/C mismatch at 0 position; | ADAR1/2 on target: |
| | gID_11904 | CAACAATATCCAT | 1/1 C/C mismatch at +2 position; | 0.65% |
| | | GATGGCAGCATT | 2/2 symmetric bulge at +9 position | ADAR1/2 specificity: |
| | | GGGATACAGTGT | (CA-AU); | 0.73 |
| | | GAAGAGCAGCA | 1/1 U/U mismatch at +12 position; | |
| | | | 6/6 symmetric internal loop at +18 | |
| | | | position (UGUAGA-CACCCU) | |
| SEQ ID | LRRK2_ | CCCTGGTGTGCCC | 6/6 symmetric internal loop at −22 | ADAR1 on target: 0.5% |
| NO: 154 | bnPCR_ | TCTGATGTTTTTC | position (GCCAUC-AAGCGA); | ADAR1 specificity: 0.66 |
| | ID16690_ | TGGTGATTCTACA | 1/1 C/A mismatch at −8 position; | ADAR2 on target: 0.64% |
| | count1976__ | ACAGTACTGAGCT | 10/10 symmetric internal loop at | ADAR2 specificity: 0.51 |
| | −22_26_ | ATCCCGAATTCAA | −4->5 position (CUACAGCAUU- | ADAR1/2 on target: |
| | gID_01893 | CAATCTTTGCAAT | UAUCCCGAAU); | 0.6% |
| | | AAGCGAAGCATT | 1/1 C/A mismatch at +17 position; | ADAR1/2 specificity: |
| | | GGGATACAGTGT | 1/1 G/G mismatch at +26 position; | 0.56 |
| | | GAAGAGCAGCA | 1/1 G/U wobble base pair at +27 | |
| | | | position; | |
| | | | 4/4 symmetric bulge at +28 | |
| | | | position (GGAU-CUGG) | |
| SEQ ID | LRRK2_ | CCCTGGTGTGCCC | 6/6 symmetric internal loop at −22 | ADAR1 on target: 0.22% |
| NO: 155 | bnPCR_ | TCTGATGTTTTTA | position (GCCAUC-CAAUCA); | ADAR1 specificity: 0.7 |
| | ID16690_ | TCCCCATTCGAAA | 1/1 C/A mismatch at −8 position; | ADAR2 on target: 0.61% |
| | count1976__ | AAAGTACTGAGC | 10/10 symmetrica internal loop at | ADAR2 specificity: 0.61 |
| | −22_16_ | TATCCCGAATTCA | −4->5 position (CUACAGCAUU- | ADAR1/2 on target: |
| | gID_06801 | ACAATCTTTGCAA | UAUCCCGAAU); | 0.57% |
| | | TCAATCAAGCATT | 6/6 symmetric internal loop at +16 | ADAR1/2 specificity: |
| | | GGGATACAGTGT | position (GCUGUA-GAAAAA) | 0.61 |
| | | GAAGAGCAGCA | | |
| SEQ ID | LRRK2_ | CCCTGGTGTGCCC | 6/6 symmetric internal loop at −16 | ADAR1 on target: 0.22% |
| NO: 156 | bnPCR_ | TCTGATGTTTTTA | position (AUUGCA-CUAUUA); | ADAR1 specificity: 0.8 |
| | ID16690_ | TCCCCATTCGAAT | 1/1 C/A mismatch at −8 position; | ADAR2 on target: 0.66% |
| | count1976__ | AAAGTACTGAGC | 10/10 symmetric internal loop at | ADAR2 specificity: 0.67 |
| | −16_16_ | TATCCCGAATTCA | −4->5 position (CUACAGCAUU- | ADAR1/2 on target: |
| | gID_10719 | ACAATCTTCTATT | UAUCCCGAAU); | 0.6% |
| | | AGATGGCAGCAT | 6/6 symmetric internal loop at +16 | ADAR1/2 specificity: 0.7 |
| | | TGGGATACAGTGT | position (GCUGUA-GAAUAA) | |
| | | GAAGAGCAGCA | | |
| SEQ ID | LRRK2_ | CCCTGGTGTGCCC | 1/1 C/U mismatch at −8 position; | ADAR1 on target: 0.49% |
| NO: 157 | bnPCR_ | TCTGATGTTTTTA | 1/1 U/G wobble base pair at −3 | ADAR1 specificity: 0.54 |
| | ID14524_ | TCCCCATTCTACA | position; | ADAR2 on target: 0.7% |
| | count2063__ | GCAGTAGTGTGC | 1/1 A/C mismatch at 0 position; | ADAR2 specificity: 0.38 |
| | NoLoops_ | AGTGCCGTGGTCA | 1/1 U/g wobble base pair at +4 | ADAR1/2 on target: |
| | gID_01159 | TCAATCTTTGCAA | position; | 0.66% |
| | | TGATGGCAGCATT | 1/1 U/U mismatch at +8 position; | ADAR1/2 specificity: |
| | | GGGATACAGTGT | 1/1 G/G mismatch at +11 position | 0.43 |
| | | GAAGAGCAGCA | | |
| SEQ ID | LRRK2_ | CCCTGGTGTGCCC | 6/6 symmetric internal loop at −14 | ADAR1 on target: 0.31% |
| NO: 158 | bnPCR_ | TCTGATGTTTTTT | position (UGCAAA-AAACGU); | ADAR1 specificity: 0.77 |
| | ID14524_ | AGGGGATTCTAC | 1/1 C/U mismatch at −8 position; | ADAR2 on target: 0.72% |
| | count2063__ | AGCAGTAGTGTG | 1/1 U/G wobble base pair at −3 | ADAR2 specificity: 0.69 |
| | −14_26_ | CAGTGCCGTGGTC | position; | ADAR1/2 on target: |
| | gID_05349 | ATCAATCAAACGT | 1/1 A/C mismatch at 0 position; | 0.68% |
| | | ATGATGGCAGCA | 1/1 U/G wobble base pair at +4 | ADAR1/2 specificity: |
| | | TTGGGATACAGTG | position; | 0.73 |
| | | TGAAGAGCAGCA | 1/1 U/U mismatch at +8 position; | |
| | | | 1/1 G/G mismatch at +11 position; | |
| | | | 6/6 symmetric internal loop at +26 | |
| | | | position (GGGGAU-UAGGGG) | |
| SEQ ID | LRRK2_ | CCCTGGTGTGCCC | 6/6 symmetric internal loop at −22 | ADAR1 on target: 0.37% |
| NO: 159 | bnPCR_ | TCTGATGTTTTTC | position (GCCAUC-AAGAGA); | ADAR1 specificity: 0.68 |
| | ID8030_ | AGTAGCTTCTACA | 1/1 U/G wobble base pair at −3 | ADAR2 on target: 0.6% |
| | count919__ | GCAGTTCGGAGG | position; | ADAR2 specificity: 0.61 |
| | −22_26_ | AATCCCGAGGTC | 1/1 A/A mismatch at −2 position; | ADAR1/2 on target: |
| | gID_12156 | AGCAATCTTTGCA | 1/1 A/C mismatch at 0 position; | 0.56% |
| | | ATAAGAGAAGCA | 1/1 C/C mismatch at +2 position; | ADAR1/2 specificity: |
| | | TTGGGATACAGTG | 1/1 G/G mismatch at +6 position; | 0.68 |
| | | TGAAGAGCAGCA | 3/3 symmetric bulge at +10 | |
| | | | position (AGU-UCG); | |
| | | | 7/7 symmetric internal loop at +25 | |
| | | | position (UGGGGAU- | |
| | | | CAGUAGC) | |
| SEQ ID | LRRK2_ | CCCTGGTGTGCCC | 6/6 symmetric internal loop at −20 | ADAR1 on target: 0.37% |
| NO: 160 | bnPCR_ | TCTGATGTTTTTT | position (CAUCAU-UACUAC); | ADAR1 specificity: 0.72 |
| | ID8030_ | AGGGGCTTCTACA | 1/1 U/G wobble base pair at −3 | ADAR2 on target: 0.59% |
| | count919__ | GCAGTTCGGAGG | position; | ADAR2 specificity: 0.67 |
| | −20_26_ | AATCCCGAGGTC | 1/1 A/A mismatch at −2 position; | ADAR1/2 on target: |
| | gID_00460 | AGCAATCTTTGCA | 1/1 A/C mismatch at 0 position; | 0.53% |
| | | TACTACGCAGCAT | 1/1 C/C mismatch at +2 position; | ADAR1/2 specificity: |
| | | TGGGATACAGTGT | 1/1 G/G mismatch at +6 position; | 0.72 |
| | | GAAGAGCAGCA | 3/3 symmetric bulge at +10 | |
| | | | position (AGU-UCG); | |
| | | | 7/7 symmetric internal loop at +25 | |
| | | | position (UGGGGAU- | |
| | | | UAGGGGC) | |
| SEQ ID | LRRK2_ | CCCTGGTGTGCCC | 6/6 symmetric internal loop at −18 | ADAR1 on target: 0.36% |
| NO: 161 | bnPCR_ | TCTGATGTTTTTA | position (UCAUUG-GUAGCU); | ADAR1 specificity: 0.77 |
| | ID8030_ | TGGAACGTCTACA | 1/1 U/G wobble base pair at −3 | ADAR2 on target: 0.63% |
| | count919__ | GCAGTTCGGAGG | position; | ADAR2 specificity: 0.67 |
| | −18_24 | AATCCCGAGGTC | 1/1 A/A mismatch at −2 position; | ADAR1/2 on target: |
| | gID_04981 | AGCAATCTTTGGT | 1/1 A/C mismatch at 0 position; | 0.57% |
| | | AGCTTGGCAGCAT | 1/1 C/C mismatch at +2 position; | ADAR1/2 specificity: 0.7 |
| | | TGGGATACAGTGT | 1/1 G/G mismatch at +6 position; | |
| | | GAAGAGCAGCA | 3/3 symmetric bulge at +10 | |
| | | | position (AGU-UCG); | |
| | | | 6/6 symmetric internal loop at +24 | |
| | | | position (AUGGGG-GGAACG) | |
| SEQ ID | LRRK2_ | CCCTGGTGTGCCC | 6/6 symmetric internal loop at −18 | ADAR1 on target: 0.33% |
| NO: 162 | bnPCR_ | TCTGATGTTTTTA | position (UCAUUG-GUCUUC); | ADAR1 specificity: 0.78 |
| | ID8030_ | TCCAGCGGGTAC | 1/1 U/G wobble base pair at −3 | ADAR2 on target: 0.62% |
| | count919__ | AGCAGTTCGGAG | position; | ADAR2 specificity: 0.69 |
| | −18_22_ | GAATCCCGAGGT | 1/1 A/A mismatch at −2 position; | ADAR1/2 on target: |
| | gID_06761 | CAGCAATCTTTGG | 1/1 A/C mismatch at 0 position; | 0.5% |
| | | TCTTCTGGCAGCA | 1/1 C/C mismatch at +2 position; | ADAR1/2 specificity: |
| | | TTGGGATACAGTG | 1/1 G/G mismatch at +6 position; | 0.73 |
| | | TGAAGAGCAGCA | 3/3 symmetric bulge at +10 | |
| | | | position (AGU-UCG); | |
| | | | 6/6 symmetric internal loop at +22 | |
| | | | position (GAAUGG-AGCGGG) | |
| SEQ ID | LRRK2_ | CCCTGGTGTGCCC | 6/6 symmetric internal loop at −16 | ADAR1 on target: 0.43% |
| NO: 163 | bnPCR_ | TCTGATGTTTCAA | position (AUUGCA-ACCCUG); | ADAR1 specificity: 0.75 |
| | ID8030_ | CGGCCCTTCTACA | 1/1 U/G wobble base pair at −3 | ADAR2 on target: 0.56% |
| | count919__ | GCAGTTCGGAGG | position; | ADAR2 specificity: 0.65 |
| | −16_28_ | AATCCCGAGGTC | 1/1 A/A mismatch at −2 position; | ADAR1/2 on target: |
| | gID_07038 | AGCAATCTTACCC | 1/1 A/C mismatch at 0 position; | 0.53% |
| | | TGGATGGCAGCA | 1/1 C/C mismatch at +2 position; | ADAR1/2 specificity: |
| | | TTGGGATACAGTG | 1/1 G/G mismatch at +6 position; | 0.66 |
| | | TGAAGAGCAGCA | 3/3 symmetric bulge at +10 | |
| | | | position (AGU-UCG); | |
| | | | 1/0 asymmetric bulge at +25 | |
| | | | position (U-); | |
| | | | 5/6 asymmetric internal loop at | |
| | | | +29 position (GAUAA- | |
| | | | CAACGG) | |
| SEQ ID | LRRK2_ | CCCTGGTGTGCCC | 6/6 symmetric internal loop at −16 | ADAR1 on target: 0.38% |
| NO: 164 | bnPCR_ | TCTGATGTTTTTA | position (AUUGCA-AAAUUA); | ADAR1 specificity: 0.81 |
| | ID8030_ | TTGAGCCTCTACA | 1/1 U/G wobble base pair at −3 | ADAR2 on target: 0.58% |
| | count919__ | GCAGTTCGGAGG | position; | ADAR2 specificity: 0.69 |
| | −16_24_ | AATCCCGAGGTC | 1/1 A/A mismatch at −2 position; | ADAR1/2 on target: |
| | gID_09086 | AGCAATCTTAAAT | 1/1 A/C mismatch at 0 position; | 0.52% |
| | | TAGATGGCAGCA | 1/1 C/C mismatch at +2 position; | ADAR1/2 specificity: |
| | | TTGGGATACAGTG | 1/1 G/G mismatch at +6 position; | 0.72 |
| | | TGAAGAGCAGCA | 3/3 symmetric bulge at +10 | |
| | | | position (AGU-UCG); | |
| | | | 5/5 symmetric internal loop at +24 | |
| | | | position (AUGGG-GAGCC); | |
| | | | 1/1 G/U wobble base pair at +29 | |
| | | | position | |
| SEQ ID | LRRK2_ | CCCTGGTGTGCCC | 6/6 symmetric internal loop at −14 | ADAR1 on target: 0.35% |
| NO: 165 | bnPCR_ | TCTGATGTTTTTT | position (UGCAAA-AAACGU); | ADAR1 specificity: 0.82 |
| | ID8030_ | AGGGGCTTCTACA | 1/1 U/G wobble base pair at −3 | ADAR2 on target: 0.59% |
| | count919__ | GCAGTTCGGAGG | position; | ADAR2 specificity: 0.73 |
| | −14_26_ | AATCCCGAGGTC | 1/1 A/A mismatch at −2 position; | ADAR1/2 on target: |
| | gID_07899 | AGCAATCAAACG | 1/1 A/C mismatch at 0 position; | 0.55% |
| | | TATGATGGCAGC | 1/1 C/C mismatch at +2 position; | ADAR1/2 specificity: |
| | | ATTGGGATACAGT | 1/1 G/G mismatch at +6 position; | 0.75 |
| | | GTGAAGAGCAGC | 3/3 symmetric bulge at +10 | |
| | | A | position (AGU-UCG); | |
| | | | 7/7 symmetric internal loop at +25 | |
| | | | position (UGGGGAU- | |
| | | | UAGGGGC) | |
| SEQ ID | LRRK2_ | CCCTGGTGTGCCC | 6/6 symmetric internal loop at −12 | ADAR1 on target: 0.46% |
| NO: 166 | bnPCR_ | TCTGATGTTTTTA | position (CAAAGA-GACUAA); | ADAR1 specificity: 0.83 |
| | ID8030_ | TGAGGCGTCTACA | 1/1 U/G wobble base pair at −3 | ADAR2 on target: 0.67% |
| | count919__ | GCAGTTCGGAGG | position; | ADAR2 specificity: 0.7 |
| | −12_24_ | AATCCCGAGGTC | 1/1 A/A mismatch at −2 position; | ADAR1/2 on target: |
| | gID_03363 | AGCAAGACTAAC | 1/1 A/C mismatch at 0 position; | 0.58% |
| | | AATGATGGCAGC | 1/1 C/C mismatch at +2 position; | ADAR1/2 specificity: |
| | | ATTGGGATACAGT | 1/1 G/G mismatch at +6 position; | 0.76 |
| | | GTGAAGAGCAGC | 3/3 symmetric bulge at +10 | |
| | | A | position (AGU-UCG); | |
| | | | 6/6 symmetric internal loop at +24 | |
| | | | position (AUGGGG-GAGGCG) | |
| SEQ ID | LRRK2_ | CCCTGGTGTGCCC | 6/6 symmetric internal loop at −10 | ADAR1 on target: 0.5% |
| NO: 167 | bnPCR_ | TCTGATGTTTTTA | position (AAGAUU-UUAGCC); | ADAR1 specificity: 0.84 |
| | ID8030_ | TTGAGCCTCTACA | 1/1 U/G wobble base pair at −3 | ADAR2 on target: 0.48% |
| | count919__ | GCAGTTCGGAGG | position; | ADAR2 specificity: 0.75 |
| | −10_24_ | AATCCCGAGGTC | 1/1 A/A mismatch at −2 position; | ADAR1/2 on target: |
| | gID_09672 | AGCTTAGCCTGCA | 1/1 A/C mismatch at 0 position; | 0.59% |
| | | ATGATGGCAGCA | 1/1 C/C mismatch at +2 position; | ADAR1/2 specificity: |
| | | TTGGGATACAGTG | 1/1 G/G mismatch at +6 position; | 0.77 |
| | | TGAAGAGCAGCA | 3/3 symmetric bulge (AGU-UCG); | |
| | | | 5/5 symmetric internal loop at +24 | |
| | | | position (AUGGG-GAGCC); | |
| | | | 1/1 G/U wobble base pair at +29 | |
| | | | position | |
| SEQ ID | LRRK2_ | CCCTGGTGTGCCC | −20_6-6_internal_loop- | |
| NO: | bnPCR_ | TCTGATGTTTTTTA | symmetric_CAUCAU-UACUAC, | |
| 3081 | ID79791_ | GGGGATTCTACAT | −4_1-1_mismatch_C-C, −3_1- | |
| | count610__ | CTGTAGTGAGCAA | 1_wobble_U-G, 0_1- | |
| | −20_26 | TTCCGTGCTCAGC | 1_mismatch_A-C, 2_1- | |
| | | AATCTTTGCATAC | 1_mismatch_C-U, 11_1- | |
| | | TACGCAGCATTGG | 1_mismatch_G-G, 15_1- | |
| | | GATACAGTGTGAA | 1_mismatch_U-U, 17_1- | |
| | | AAGCAGCA | 1_mismatch_C-U, 26_6- | |
| | | | 6_internal_loop- | |
| | | | symmetric_GGGGAU-UAGGGG | |
| SEQ ID | LRRK2_ | CCCTGGTGTGCCC | −20_6-6_internal_loop- | |
| NO: | bnPCR_ | TCTGATGTTTTTTA | symmetric_CAUCAU-UACUAC, | |
| 3082 | ID16690_ | GGGGATTCTACAA | −8_1-1_mismatch_C-A, −4->5_10- | |
| | count1976__ | CAGTACTGAGCTA | 10_internal_loop- | |
| | −20_26 | TCCCGAATTCAAC | symmetric_CUACAGCAUU- | |
| | | AATCTTTGCATAC | UAUCCCGAAU, 17_1- | |
| | | TACGCAGCATTGG | 1_mismatch_C-A, 26_6- | |
| | | GATACAGTGTGAA | 6_internal_loop- | |
| | | AAGCAGCA | symmetric_GGGGAU-UAGGGG | |

### Example 15

### Machine Learning for Barbell Position

[0429] This example describes using machine learning to determine the positioning of barbells in a guide RNA that impact on-target editing and specificity score for editing a LRRK2 mRNA via ADAR. A set of 1709 engineered guide RNAs was used to train and test a random forest (RF) model. Of this set of guides, 1000 engineered guides were used to train the RF model and 709 engineered guides were used to test the accuracy of the trained RF model for predicting on-target editing and specificity score based on an engineered guide sequence. There was a high correlation between the predicted on-target editing and specificity score and the experimentally tested on-target editing and specificity score, indicating that the trained RF model accurately predicts on-target editing and specificity score based on an engineered guide sequence. This trained RF model was then used to determine the importance of characteristic features in the guide RNAs that impact on-target editing and specificity score, such as length of time for editing (20 sec, 1 min, 3 min, 10 min, 30 min, or 60 min), the ADAR used for editing (ADAR1, ADAR2, or ADAR1 and ADAR2), positioning of a right barbell (relative to the target adenosine to be edited), positioning of left barbell (relative to the target nucleotide to be edited). Right barbell positioning was identified as the most important feature for predicting the specificity of an engineered guide RNA and the third most important feature for predicting on-target editing. For engineered guide RNAs using ADAR1 for editing, the best positioning of the right barbell in an engineered guide RNA to achieve a high specificity score was +28 or +30 nts, wherein the positioning is relative to the target adenosine in the LRRK2 mRNA to be edited. For engineered guide RNAs using ADAR2 for editing, the best positioning of the right barbell in an engineered guide RNA to achieve a high specificity score was +24 or +26 nts, wherein the positioning is relative to the target adenosine in the LRRK2 mRNA to be edited.

### Example 16

Engineered Guide RNAs with Barbells Targeting DUX4

[0430] This example describes engineered guide RNAs with barbells targeting the polyadenylation (polyA) signal site (ATTAAA) in the “pLAM” region of DUX4 mRNA. One or more of the three terminal As in the polyA signal site sequence (ATTAAA) was targeted for editing via ADAR using the engineered guide RNA sequences of TABLE 4. Self-annealing RNA structures, which comprised (i) the engineered guide RNAs having barbells shown in TABLE 4 and (ii) the RNA sequences of the DUX4 region targeted by the engineered guide RNAs, were contacted with an RNA editing entity (e.g., a recombinant ADAR1 and/or ADAR2) for 30 minutes under conditions that allowed for editing. The regions targeted by the engineered guide RNAs were subsequently assessed for editing using next generation sequencing (NGS). Engineered guide RNAs having barbells that displayed favorable on-target editing of DUX4 for ADAR1 and/or ADAR2 are shown in TABLE 4. All polynucleotide sequences encoding for the engineered guide RNAs of TABLE 4, are also encompassed herein. Further, each engineered guide RNA sequence can be represented as a DNA sequence in which each U is replaced with a T. For each sequence, the structural features formed in the double stranded RNA substrate upon hybridization of the guide RNA to the target DUX4 RNA, are shown in the second column of TABLE 4 and the position of the left bell (“LB”) and right bell (“RB”) of the barbell are shown in the third and fourth columns, respectively. For reference, each structural feature formed within a guide-target RNA scaffold (target RNA sequence hybridized to an engineered guide RNA) is annotated as follows:
[0431] a. the position of the structural feature with respect to the target A (position 0) of the target RNA sequence, with a negative value indicating upstream (5′) of the target A and a positive value indicating downstream (3′) of the target A;
[0432] b. the number of bases in the target RNA sequence and the number of bases in the engineered guide RNA that together form the structural feature—for example, 6/6 indicates that six contiguous bases from the target RNA sequence and six contiguous bases from the engineered guide RNA form the structural feature;
[0433] c. the name of the structural feature (e.g., symmetric bulge, symmetric internal loop, asymmetric bulge, asymmetric internal loop, mismatch, or wobble base pair), and
[0434] d. the sequences of bases on the target RNA side and the engineered guide RNA side that participate in forming the structural feature.

[0435] For example, in SEQ ID NO: 172, “−12_6-6_internal_loop-symmetric_GAUUAG-AAACCG” is read as a structural feature formed in a guide-target RNA scaffold (target RNA sequence hybridized to an engineered guide RNA of SEQ ID NO: 172), where
[0436] a. the structural feature starts 12 nucleotides upstream (5′) (the −12 position) from the target A (0 position) of the target RNA sequence
[0437] b. six contiguous bases from the target RNA sequence and six contiguous bases from the engineered guide RNA form the structural feature
[0438] c. the structural feature is an internal symmetric loop
[0439] d. a sequence of GAUUAG from the target RNA side and a sequence of AAACCG from the engineered guide RNA side participate in forming the internal symmetric loop.

[0440] For reference, FIG. 36 can be used as an aid to visualize the structural features and the nomenclature disclosed herein. Each of the engineered guide RNAs of TABLE 4 showed editing of one or more of the three terminal As in the polyA signal site sequence (ATTAAA) of DUX4 mRNA, as summarized in TABLE 5, with the first A indicated as “P0” for position 0, the second A indicated as “P3” for position 3, the third A indicated as “P4” for position 4, the fourth A indicated as “P5” for position 5, and any of the As is indicated as “Any”. In TABLE 5, “A1” indicates ADAR1, “A2” indicates ADAR2, and “A1+2” indicates ADAR1 and ADAR 2. “Percent on-target editing is calculated by the following formula: the number of reads containing “G” at the target/the total number of reads.

Lengthy table referenced here
US20250009904A1-20250109-T00001
Please refer to the end of the specification for access instructions.

Lengthy table referenced here
US20250009904A1-20250109-T00002
Please refer to the end of the specification for access instructions.

### Example 17

Engineered Guide RNA with Barbells Targeting the MAPT TIS

[0441] This example describes sequences of engineered guide RNAs with barbells targeting the TIS of MAPT. Self-annealing RNA structures, which comprised (i) the engineered guide RNAs having barbells shown in TABLE 6 and (ii) the RNA sequences of the MAPT region targeted by the engineered guide RNAs, were contacted with an RNA editing entity (e.g., a recombinant ADAR1 and/or ADAR2) for 30 minutes under conditions that allowed for editing. The regions targeted by the engineered guide RNAs were subsequently assessed for editing by next generation sequencing (NGS). Engineered guide RNAs having barbells that displayed greater than 50% on-target editing of the MAPT TIS for ADAR1 and/or ADAR2, as quantified at a read depth of >200, are shown in TABLE 6. All polynucleotide sequences encoding for the engineered guide RNAs of TABLE 6, are also encompassed herein. Further, each engineered guide RNA sequence can be represented as a DNA sequence in which each U is replaced with a T. For each sequence, the structural features formed in the double stranded RNA substrate upon hybridization of the guide RNA to the target MAPT RNA, are shown in the second column of TABLE 6 and the position of the left bell (“LB”) and the right bell (“RB”) of the barbell are shown in the third and fourth columns, respectively. For reference, each structural feature is annotated as follows: position of the structural feature with a negative value indicating upstream of the target A and a positive value indicating downstream of the target A, the name of the structural feature (e.g., symmetric bulge, symmetric internal loop, asymmetric bulge, asymmetric internal loop, or mismatch), and the sequence of participating bases on the target RNA side and the guide RNA side. For example, in SEQ ID NO: 1519, “−22_3-3_bulge-symmetric_CUA-GAU” is read as a 3/3 symmetric bulge (CUA on the target side, GAU on the engineered guide RNA side) in the −22 position. For reference, FIG. 36 can be used as an aid to visualize the structural features and the nomenclature disclosed herein. Table 6 further includes the amount of on target editing achieved via ADAR1 or ADAR2 seperately, as well as ADAR1 and ADAR2. The specificity of each guide was also calculated for each engineered guide via ADAR1, ADAR2, and ADAR1+ADAR2. Specificity as provided in Table 6 was calculated using the formula: Specificity=(fraction on-target editing+1)/(sum(non-synonymous off-target editing)). These data highlight the diverse sequence space represented by the MAPT-targeting engineered guide RNAs of the present disclosure, which have a range of different structural features that drive sequence diversity and which exhibit high on-target editing efficiency.

Lengthy table referenced here
US20250009904A1-20250109-T00003
Please refer to the end of the specification for access instructions.

### Example 18

Engineered Guide RNAs with Barbells Targeting the SNCA TIS

[0442] This example describes sequences of engineered guide RNAs with barbells targeting the TIS of SNCA. Self-annealing RNA structures, which comprised (i) the engineered guide RNAs having barbells shown in TABLE 7 and (ii) the RNA sequences of the SNCA region targeted by the engineered guide RNAs, were contacted with an RNA editing entity (e.g., a recombinant ADAR1 and/or ADAR2) for 30 minutes under conditions that allowed for editing. The regions targeted by the engineered guide RNAs were subsequently assessed for editing by next generation sequencing (NGS). Engineered guide RNAs having barbells that displayed greater than 50% on-target editing of the SNCA TIS for ADAR1 and/or ADAR2, as quantified at a read depth of >200, are shown in TABLE 7. All polynucleotide sequences encoding for the engineered guide RNA of TABLE 7 are also encompassed herein. Further, each engineered guide RNA sequence can be represented as a DNA sequence in which each U is replaced with a T. For each sequence, the structural features formed in the double stranded RNA substrate upon hybridization of the guide RNA to the target SNCA RNA, are shown in the second column of TABLE 7 and the position of the left bell (“LB”) and the right bell (“RB”) of the barbell are shown in the third and fourth columns, respectively. For reference, each structural feature is annotated as follows: position of the structural feature with a negative value indicating upstream of the target A and a positive value indicating downstream of the target A, the name of the structural feature (e.g., symmetric bulge, symmetric internal loop, asymmetric bulge, asymmetric internal loop, or mismatch), and the sequence of participating bases on the target RNA side and the guide RNA side. For example, in SEQ ID NO: 2480, “−33_4-4_bulge-symmetric_UUCG-ACAU” is read as a 4/4 symmetric bulge (UUCG on the target side, ACAU on the engineered guide RNA side) in the −33 position. For reference, FIG. 36 can be used as an aid to visualize the structural features and the nomenclature disclosed herein. TABLE 7 further includes the amount of on target editing achieved via ADAR1 or ADAR2 seperately, as well as ADAR1 and ADAR2. The specificity of each guide was also calculated for each engineered guide via ADAR1, ADAR2, and ADAR1+ADAR2. Specificity as provided in Table 7 was calculated using the formula: Specificity=(fraction on-target editing+1)/(sum(non-synonymous off-target editing)). These data highlight the diverse sequence space represented by the SNCA TIS-targeting engineered guide RNAs of the present disclosure, which have a range of different structural features that drive sequence diversity and which exhibit high on-target editing efficiency.

TABLE 7
Engineered Guide RNAs with Barbells Targeting the SNCA TIS

| SEQ | | | | | ADAR1 | ADAR2 | ADAR1/2 | | | |
|---|---|---|---|---|---|---|---|---|---|---|
| ID | | | | | on- | on- | on- | ADAR1 | ADAR2 | ADAR1/2 |
| NO | Structural Features (target/guide) | Engineered Guide RNA Sequence | LB | RB | target | target | target | specificity | specificity | specificity |
| 2480 | −33_4-4_bulge-symmetric_UUCG- | GCCACAUGAGGGUCCUUGG | −10 | 38 | 0.501 | 0.91 | 0.908 | 0.739 | 0.641 | 0.7 |
| | ACAU | CCUUUGAAAGUCCUUUCAU | | | | | | | | |
| | −20_4-4_bulge-symmetric_UGGU- | GAAUACAGCCACGGCUAAU | | | | | | | | |
| | UAGU | UGACAUGGCUUACUAGUCA | | | | | | | | |
| | −10_6-6_internal_loop- | CUGUCGUACAUUGGCCACU | | | | | | | | |
| | symmetric_AGGAAU-CAUGGC | CCCAGU | | | | | | | | |
| | −6_0-1_bulge-asymmetric_-U | | | | | | | | | |
| | 0_1-1_mismatch_A-C | | | | | | | | | |
| | 4_1-1_mismatch_A-G | | | | | | | | | |
| | 38_6-6_internal_loop- | | | | | | | | | |
| | symmetric_GGGAGU-UGAGGG | | | | | | | | | |
| 2481 | −33_4-4_bulge-symmetric_UUCG- | GCCACAUGGAGGUCCUUGG | −4 | 38 | 0.506 | 0.541 | 0.725 | 0.862 | 0.579 | 0.673 |
| | ACAU | CCUUUGAAAGUCCUUUCAU | | | | | | | | |
| | −20_4-4_bulge-symmetric_UGGU- | GAAUACAACCACGGCGUCG | | | | | | | | |
| | UAGU | CUAUUCCUUUACUAGUCAC | | | | | | | | |
| | −4_6-6_internal_loop- | UGUCGUACAUUGGCCACUC | | | | | | | | |
| | symmetric_UCAUUA-GUCGCU | CCAGU | | | | | | | | |
| | 0_1-1_mismatch_A-C | | | | | | | | | |
| | 4_1-1_mismatch_A-A | | | | | | | | | |
| | 38_6-6_internal_loop- | | | | | | | | | |
| | symmetric_GGGAGU-UGGAGG | | | | | | | | | |
| 2482 | −33_4-4_bulge-symmetric_UUCG- | GCCACACAGACCUCCUCUAC | −12 | 28 | 0.115 | 0.747 | 0.735 | 1.02 | 1.554 | 1.482 |
| | ACAU | GGUUGAAAGUCCUUUCAUG | | | | | | | | |
| | −20_4-4_bulge-symmetric_UGGU- | AAUACUCUCCACGGCAAUG | | | | | | | | |
| | UAGU | AAUGAAUUGACUAGUCACU | | | | | | | | |
| | −12_6-6_internal_loop- | GUCGUACAUUGGCCACUCCC | | | | | | | | |
| | symmetric_AAAGGA-GAAUUG | AGU | | | | | | | | |
| | −4_1-0_bulge-asymmetric_A- | | | | | | | | | |
| | 0_1-1_mismatch_A-C | | | | | | | | | |
| | 5_1-2_bulge-asymmetric_U-UC | | | | | | | | | |
| | 28_6-6_internal_loop- | | | | | | | | | |
| | symmetric_AGGCCA-CUACGG | | | | | | | | | |
| | 40_4-4_bulge-symmetric_GAGU- | | | | | | | | | |
| | CAGA | | | | | | | | | |
| 2483 | −33_4-4_bulge-symmetric_UUCG- | GCCACACAGACCUCCUUGGC | −8 | 24 | 0.087 | 0.62 | 0.661 | 0.982 | 1.414 | 1.433 |
| | ACAU | AAAGCUAAGUCCUUUCAUG | | | | | | | | |
| | −20_4-4_bulge-symmetric_UGGU- | AAUAAUUCCACGGCUGAUC | | | | | | | | |
| | UAGU | CGGGGCUUUACUAGUCACU | | | | | | | | |
| | −8_6-6_internal_loop- | GUCGUACAUUGGCCACUCCC | | | | | | | | |
| | symmetric_GAAUUC-CCGGGG | AGU | | | | | | | | |
| | −5_1-1_wobble_U-G | | | | | | | | | |
| | 0_1-1_mismatch_A-C | | | | | | | | | |
| | 5_2-2_bulge-symmetric_UG-AU | | | | | | | | | |
| | 24_6-6_internal_loop- | | | | | | | | | |
| | symmetric_UCAAAG-AAAGCU | | | | | | | | | |
| | 40_4-4_bulge-symmetric_GAGU- | | | | | | | | | |
| | CAGA | | | | | | | | | |
| 2484 | −33_4-4_bulge-symmetric_UUCG- | GCCACACAGACCUCGAUCUA | −12 | 30 | 0.177 | 0.758 | 0.803 | 1.047 | 1.287 | 1.412 |
| | ACAU | CUUUGAAAGUCCUUUCAUG | | | | | | | | |
| | −20_4-4_bulge-symmetric_UGGU- | GCUACAUCCACGGCUCAAG | | | | | | | | |
| | UAGU | AAUGUACAGACUAGUCACU | | | | | | | | |
| | −12_6-6_internal_loop- | GUCGUACAUUGGCCACUCCC | | | | | | | | |
| | symmetric_AAAGGA-GUACAG | AGU | | | | | | | | |
| | −5_3-3_bulge-symmetric_AUU-CAA | | | | | | | | | |
| | 0_1-1_mismatch_A-C | | | | | | | | | |
| | 9_1-1_mismatch_U-C | | | | | | | | | |
| | 10_1-1_wobble_U-G | | | | | | | | | |
| | 30_6-6_internal_loop- | | | | | | | | | |
| | symmetric_GCCAAG-GAUCUA | | | | | | | | | |
| | 40_4-4_bulge-symmetric_GAGU- | | | | | | | | | |
| | CAGA | | | | | | | | | |
| 2485 | −33_4-4_bulge-symmetric_UUCG- | GCCACACAGACCUCCUAAAG | −10 | 28 | 0.193 | 0.739 | 0.732 | 1.052 | 1.464 | 1.42 |
| | ACAU | AGUUGAAAGUCCUUUCAUG | | | | | | | | |
| | −20_4-4_bulge-symmetric_UGGU- | UAUACAUCCACGACUCCUG | | | | | | | | |
| | UAGU | ACCAGUGUUACUAGUCACU | | | | | | | | |
| | −10_6-6_internal_loop- | GUCGUACAUUGGCCACUCCC | | | | | | | | |
| | symmetric_AGGAAU-CCAGUG | AGU | | | | | | | | |
| | −5_2-2_bulge-symmetric_UU-CC | | | | | | | | | |
| | −2_1-1_mismatch_C-A | | | | | | | | | |
| | 0_1-1_mismatch_A-C | | | | | | | | | |
| | 10_1-1_mismatch_U-U | | | | | | | | | |
| | 28_6-6_internal_loop- | | | | | | | | | |
| | symmetric_AGGCCA-AAAGAG | | | | | | | | | |
| | 40_4-4_bulge-symmetric_GAGU- | | | | | | | | | |
| | CAGA | | | | | | | | | |
| 2486 | −33_4-4_bulge-symmetric_UUCG- | GCCACACAGACCUCCUUGUU | −8 | 26 | 0.027 | 0.613 | 0.652 | 0.958 | 1.446 | 1.453 |
| | ACAU | AAGGGAAAGUCCUUUCCCG | | | | | | | | |
| | −20_4-4_bulge-symmetric_UGGU- | AAUACAUCCACGGCUAAUU | | | | | | | | |
| | UAGU | CUCGACUUUACUAGUCACU | | | | | | | | |
| | −8_6-6_internal_loop- | GUCGUACAUUGGCCACUCCC | | | | | | | | |
| | symmetric_GAAUUC-UCUCGA | AGU | | | | | | | | |
| | 0_1-1_mismatch_A-C | | | | | | | | | |
| | 12_2-2_bulge-symmetric_AU-CC | | | | | | | | | |
| | 26_6-6_internal_loop- | | | | | | | | | |
| | symmetric_AAAGGC-UUAAGG | | | | | | | | | |
| | 40_4-4_bulge-symmetric_GAGU- | | | | | | | | | |
| | CAGA | | | | | | | | | |
| 2487 | −33_4-4_bulge-symmetric_UUCG- | GCCACACAGACCAGGAUCGC | −6 | 32 | 0.114 | 0.928 | 0.923 | 0.951 | 1.498 | 1.475 |
| | ACAU | CUUUGAAAGUCCUUCCCUG | | | | | | | | |
| | −20_4-4_bulge-symmetric_UGGU- | AAUACAUCCACGGCUACGA | | | | | | | | |
| | UAGU | CAGUCCUUUACUAGUCACU | | | | | | | | |
| | −6_6-6_internal_loop- | GUCGUACAUUGGCCACUCCC | | | | | | | | |
| | symmetric_AUUCAU-CGACAG | AGU | | | | | | | | |
| | 0_1-1_mismatch_A-C | | | | | | | | | |
| | 13_1-1_mismatch_U-C | | | | | | | | | |
| | 15_1-1_mismatch_A-C | | | | | | | | | |
| | 32_6-6_internal_loop- | | | | | | | | | |
| | symmetric_CAAGGA-AGGAUC | | | | | | | | | |
| | 40_4-4_bulge-symmetric_GAGU- | | | | | | | | | |
| | CAGA | | | | | | | | | |
| 2488 | −33_4-4_bulge-symmetric_UUCG- | GCCACACAGACCUCAUUCGA | −4 | 30 | 0.064 | 0.704 | 0.79 | 0.951 | 1.449 | 1.527 |
| | ACAU | CUUUGAAAGUCCUUUCAGG | | | | | | | | |
| | −20_4-4_bulge-symmetric_UGGU- | AAUAACUCCACGGCACGGU | | | | | | | | |
| | UAGU | CAUUCCUUUACUAGUCACU | | | | | | | | |
| | −4_6-6_internal_loop- | GUCGUACAUUGGCCACUCCC | | | | | | | | |
| | symmetric_UCAUUA-ACGGUC | AGU | | | | | | | | |
| | 0_1-1_mismatch_A-C | | | | | | | | | |
| | 5_2-2_bulge-symmetric_UG-AC | | | | | | | | | |
| | 12_1-1_mismatch_A-G | | | | | | | | | |
| | 30_6-6_internal_loop- | | | | | | | | | |
| | symmetric_GCCAAG-AUUCGA | | | | | | | | | |
| | 40_4-4_bulge-symmetric_GAGU- | | | | | | | | | |
| | CAGA | | | | | | | | | |
| 2489 | −33_4-4_bulge-symmetric_UUCG- | GCCACACAGACCUCCUUGAU | −6 | 26 | 0.026 | 0.94 | 0.932 | 0.936 | 1.755 | 1.707 |
| | ACAU | AGCAGAAAGUCAAUUUAUG | | | | | | | | |
| | −20_4-4_bulge-symmetric_UGGU- | AAUACAUCCACGGCUAUUU | | | | | | | | |
| | UAGU | AUGUCCUUUACUAGUCACU | | | | | | | | |
| | −6_6-6_internal_loop- | GUCGUACAUUGGCCACUCCC | | | | | | | | |
| | symmetric_AUUCAU-UUUAUG | AGU | | | | | | | | |
| | 0_1-1_mismatch_A-C | | | | | | | | | |
| | 14_1-1_wobble_G-U | | | | | | | | | |
| | 17_2-2_bulge-symmetric_AG-AA | | | | | | | | | |
| | 26_6-6_internal_loop- | | | | | | | | | |
| | symmetric_AAAGGC-AUAGCA | | | | | | | | | |
| | 40_4-4_bulge-symmetric_GAGU- | | | | | | | | | |
| | CAGA | | | | | | | | | |
| 2490 | −33_4-4_bulge-symmetric_UUCG- | GCCACACAGACCUCCUCUUU | −6 | 28 | 0.025 | 0.853 | 0.867 | 0.931 | 1.63 | 1.605 |
| | ACAU | UGUUGAAAGUAGGUUCAUG | | | | | | | | |
| | −20_4-4_bulge-symmetric_UGGU- | ACACAUCCACGGCUACGUU | | | | | | | | |
| | UAGU | UCUCCUUUACUAGUCACUG | | | | | | | | |
| | −6_6-6_internal_loop- | UCGUACAUUGGCCACUCCCA | | | | | | | | |
| | symmetric_AUUCAU-CGUUUC | GU | | | | | | | | |
| | 0_1-1_mismatch_A-C | | | | | | | | | |
| | 8_2-1_bulge-asymmetric_AU-C | | | | | | | | | |
| | 17_3-3_bulge-symmetric_AGG-AGG | | | | | | | | | |
| | 28_6-6_internal_loop- | | | | | | | | | |
| | symmetric_AGGCCA-CUUUUG | | | | | | | | | |
| | 40_4-4_bulge-symmetric_GAGU- | | | | | | | | | |
| | CAGA | | | | | | | | | |
| 2491 | −33_4-4_bulge-symmetric_UUCG- | GCCACACAGACCUCCUAUAU | −6 | 28 | 0.036 | 0.832 | 0.843 | 0.938 | 1.523 | 1.544 |
| | ACAU | UCUUGAAAGUCCUUGCAUG | | | | | | | | |
| | −20_4-4_bulge-symmetric_UGGU- | AAUGCAUUCACGGCUAUCA | | | | | | | | |
| | UAGU | GGCUCCUUUACUAGUCACU | | | | | | | | |
| | −6_6-6_internal_loop- | GUCGUACAUUGGCCACUCCC | | | | | | | | |
| | symmetric_AUUCAU-UCAGGC | AGU | | | | | | | | |
| | 0_1-1_mismatch_A-C | | | | | | | | | |
| | 3_1-1_wobble_G-U | | | | | | | | | |
| | 7_1-1_wobble_U-G | | | | | | | | | |
| | 15_1-1_mismatch_A-G | | | | | | | | | |
| | 28_6-6_internal_loop- | | | | | | | | | |
| | symmetric_AGGCCA-AUAUUC | | | | | | | | | |
| | 40_4-4_bulge-symmetric_GAGU- | | | | | | | | | |
| | CAGA | | | | | | | | | |
| 2492 | −33_4-4_bulge-symmetric_UUCG- | GCCACACAGACCUCCUUGUA | −10 | 26 | 0.153 | 0.689 | 0.692 | 1.027 | 1.486 | 1.42 |
| | ACAU | UGACGAAAGUCCUUUCAUG | | | | | | | | |
| | −20_4-4_bulge-symmetric_UGGU- | AAUACAAUCCACGGCUAAU | | | | | | | | |
| | UAGU | GACGCGUAUUACUAGUCAC | | | | | | | | |
| | −10_6-6_internal_loop- | UGUCGUACAUUGGCCACUC | | | | | | | | |
| | symmetric_AGGAAU-CGCGUA | CCAGU | | | | | | | | |
| | 0_1-1_mismatch_A-C | | | | | | | | | |
| | 5_0-1_bulge-asymmetric_-A | | | | | | | | | |
| | 26_6-6_internal_loop- | | | | | | | | | |
| | symmetric_AAAGGC-UAUGAC | | | | | | | | | |
| | 40_4-4_bulge-symmetric_GAGU- | | | | | | | | | |
| | CAGA | | | | | | | | | |
| 2493 | −33_4-4_bulge-symmetric_UUCG- | GCCACACAGACCUCCUAAUA | −10 | 28 | 0.07 | 0.932 | 0.9 | 0.955 | 1.66 | 1.583 |
| | ACAU | AGUUGAAAGUCUUUUCAUG | | | | | | | | |
| | −20_4-4_bulge-symmetric_UGGU- | AAUACAUUCACGGCUAAUG | | | | | | | | |
| | UAGU | ACGCGAAUUACUAGUCACU | | | | | | | | |
| | −10_6-6_internal_loop- | GUCGUACAUUGGCCACUCCC | | | | | | | | |
| | symmetric_AGGAAU-CGCGAA | AGU | | | | | | | | |
| | 0_1-1_mismatch_A-C | | | | | | | | | |
| | 3_1-1_wobble_G-U | | | | | | | | | |
| | 18_1-1_wobble_G-U | | | | | | | | | |
| | 28_6-6_internal_loop- | | | | | | | | | |
| | symmetric_AGGCCA-AAUAAG | | | | | | | | | |
| | 40_4-4_bulge-symmetric_GAGU- | | | | | | | | | |
| | CAGA | | | | | | | | | |
| 2494 | −33_4-4_bulge-symmetric_UUCG- | GCCACACAGACCAAAGAUG | −20 | 32 | 0.086 | 0.919 | 0.921 | 0.812 | 1.583 | 1.529 |
| | ACAU | CCUUUGAAAGUCCUUUCAG | | | | | | | | |
| | −20_6-6_internal_loop- | GAAUACAUCCACGGCUAAU | | | | | | | | |
| | symmetric_UGUGGU-UGAGGU | GAAUUCCUUUACUGAGGUC | | | | | | | | |
| | 0_1-1_mismatch_A-C | UGUCGUACAUUGGCCACUC | | | | | | | | |
| | 12_1-1_mismatch_A-G | CCAGU | | | | | | | | |
| | 32_6-6_internal_loop- | | | | | | | | | |
| | symmetric_CAAGGA-AAAGAU | | | | | | | | | |
| | 40_4-4_bulge-symmetric_GAGU- | | | | | | | | | |
| | CAGA | | | | | | | | | |
| 2495 | −33_4-4_bulge-symmetric_UUCG- | GCCACAUAGGGAUCCUUGG | −8 | 38 | 0.105 | 0.694 | 0.724 | 0.622 | 0.977 | 0.898 |
| | ACAU | CCUUUGAAAGUCCUUUCAG | | | | | | | | |
| | −20_4-4_bulge-symmetric_UGGU- | GAAUACAUCCACGGCUAAU | | | | | | | | |
| | UAGU | CUGCGGCUUUACUAGUCAC | | | | | | | | |
| | −8_6-6_internal_loop- | UGUCGUACAUUGGCCACUC | | | | | | | | |
| | symmetric_GAAUUC-CUGCGG | CCAGU | | | | | | | | |
| | 0_1-1_mismatch_A-C | | | | | | | | | |
| | 12_1-1_mismatch_A-G | | | | | | | | | |
| | 38_6-6_internal_loop- | | | | | | | | | |
| | symmetric_GGGAGU-UAGGGA | | | | | | | | | |
| 2496 | −33_4-4_bulge-symmetric_UUCG- | GCCACACAGACCUCGCGCAA | −18 | 30 | 0.277 | 0.917 | 0.896 | 1.123 | 1.616 | 1.576 |
| | ACAU | CUUUGAAAGUCCUUUCAUG | | | | | | | | |
| | −18_6-6_internal_loop- | CAUAGAUCCACGGCUACAU | | | | | | | | |
| | symmetric_UGGUGU-UGGAGU | AAUUCCUUUUGGAGUCACU | | | | | | | | |
| | −6_3-3_bulge-symmetric_CAU-CAU | GUCGUACAUUGGCCACUCCC | | | | | | | | |
| | 0_1-1_mismatch_A-C | AGU | | | | | | | | |
| | 6_1-1_mismatch_G-G | | | | | | | | | |
| | 10_1-1_mismatch_U-C | | | | | | | | | |
| | 30_6-6_internal_loop- | | | | | | | | | |
| | symmetric_GCCAAG-GCGCAA | | | | | | | | | |
| | 40_4-4_bulge-symmetric_GAGU- | | | | | | | | | |
| | CAGA | | | | | | | | | |
| 2497 | −33_4-4_bulge-symmetric_UUCG- | GCCACACAGACCUCCUUGAU | −6 | 26 | 0.033 | 0.746 | 0.786 | 0.926 | 1.522 | 1.523 |
| | ACAU | GGAGGAAAGUAGCAUCAUG | | | | | | | | |
| | −20_4-4_bulge-symmetric_UGGU- | UUUACAUCCACGGCUAUGC | | | | | | | | |
| | UAGU | CUGUCCUUUACUAGUCACU | | | | | | | | |
| | −6_6-6_internal_loop- | GUCGUACAUUGGCCACUCCC | | | | | | | | |
| | symmetric_AUUCAU-UGCCUG | AGU | | | | | | | | |
| | 0_1-1_mismatch_A-C | | | | | | | | | |
| | 9_2-2_bulge-symmetric_UU-UU | | | | | | | | | |
| | 16_4-4_bulge-symmetric_AAGG- | | | | | | | | | |
| | AGCA | | | | | | | | | |
| | 26_6-6_internal_loop- | | | | | | | | | |
| | symmetric_AAAGGC-AUGGAG | | | | | | | | | |
| | 40_4-4_bulge-symmetric_GAGU- | | | | | | | | | |
| | CAGA | | | | | | | | | |
| 2498 | −33_4-4_bulge-symmetric_UUCG- | GCCACACAGACCUCCUUGGC | −8 | 24 | 0.031 | 0.493 | 0.537 | 0.936 | 1.295 | 1.321 |
| | ACAU | AUACUUAAGUCCUUUCAUC | | | | | | | | |
| | −20_4-4_bulge-symmetric_UGGU- | AUACAUCCACGGCUAAUUU | | | | | | | | |
| | UAGU | UGGGCUUUACUAGUCACUG | | | | | | | | |
| | −8_6-6_internal_loop- | UCGUACAUUGGCCACUCCCA | | | | | | | | |
| | symmetric_GAAUUC-UUUGGG | GU | | | | | | | | |
| | 0_1-1_mismatch_A-C | | | | | | | | | |
| | 10_2-1_bulge-asymmetric_UC-C | | | | | | | | | |
| | 24_6-6_internal_loop- | | | | | | | | | |
| | symmetric_UCAAAG-AUACUU | | | | | | | | | |
| | 40_4-4_bulge-symmetric_GAGU- | | | | | | | | | |
| | CAGA | | | | | | | | | |
| 2499 | −33_4-4_bulge-symmetric_UUCG- | GCCACACAGACCUCCUAUUA | −8 | 28 | 0.107 | 0.948 | 0.96 | 0.969 | 1.684 | 1.728 |
| | ACAU | GGUUGAAAGUACUUUCAUG | | | | | | | | |
| | −20_4-4_bulge-symmetric_UGGU- | AAUACAUCCACGGCUAAUU | | | | | | | | |
| | UAGU | UAAAACUUUACUAGUCACU | | | | | | | | |
| | −8_6-6_internal_loop- | GUCGUACAUUGGCCACUCCC | | | | | | | | |
| | symmetric_GAAUUC-UUAAAA | AGU | | | | | | | | |
| | 0_1-1_mismatch_A-C | | | | | | | | | |
| | 19_1-1_mismatch_G-A | | | | | | | | | |
| | 28_6-6_internal_loop- | | | | | | | | | |
| | symmetric_AGGCCA-AUUAGG | | | | | | | | | |
| | 40_4-4_bulge-symmetric_GAGU- | | | | | | | | | |
| | CAGA | | | | | | | | | |
| 2500 | −33_4-4_bulge-symmetric_UUCG- | GCCACAUGGGAGUCCUUGG | −10 | 38 | 0.056 | 0.815 | 0.8 | 0.61 | 0.754 | 0.773 |
| | ACAU | CCUUUGAAAGUCCUUUAAU | | | | | | | | |
| | −20_4-4_bulge-symmetric_UGGU- | GAAUACAUCCACGGAAAUG | | | | | | | | |
| | UAGU | AUAUAGCUUACUAGUCACU | | | | | | | | |
| | −10_6-6_internal_loop- | GUCGUACAUUGGCCACUCCC | | | | | | | | |
| | symmetric_AGGAAU-UAUAGC | AGU | | | | | | | | |
| | −3_2-1_bulge-asymmetric_AG-A | | | | | | | | | |
| | 0_1-1_mismatch_A-C | | | | | | | | | |
| | 14_1-1_mismatch_G-A | | | | | | | | | |
| | 38_6-6_internal_loop- | | | | | | | | | |
| | symmetric_GGGAGU-UGGGAG | | | | | | | | | |
| 2501 | −33_4-4_bulge-symmetric_UUCG- | GCCACACAGACCUCAGACAG | −10 | 30 | 0.132 | 0.913 | 0.908 | 0.993 | 1.431 | 1.472 |
| | ACAU | CUUUGAAAGUCCUAUCAUG | | | | | | | | |
| | −20_4-4_bulge-symmetric_UGGU- | AAUAGAUCCACGGCUAAUG | | | | | | | | |
| | UAGU | ACGGUAGUUACUAGUCACU | | | | | | | | |
| | −10_6-6_internal_loop- | GUCGUACAUUGGCCACUCCC | | | | | | | | |
| | symmetric_AGGAAU-CGGUAG | AGU | | | | | | | | |
| | 0_1-1_mismatch_A-C | | | | | | | | | |
| | 6_1-1_mismatch_G-G | | | | | | | | | |
| | 16_1-1_mismatch_A-A | | | | | | | | | |
| | 30_6-6_internal_loop- | | | | | | | | | |
| | symmetric_GCCAAG-AGACAG | | | | | | | | | |
| | 40_4-4_bulge-symmetric_GAGU- | | | | | | | | | |
| | CAGA | | | | | | | | | |
| 2502 | −33_4-4_bulge-symmetric_UUCG- | GCCACAUAGCGGUCCUUGG | −8 | 38 | 0.434 | 0.916 | 0.93 | 0.679 | 0.628 | 0.641 |
| | ACAU | CCUUUGAAAGUCCUUUCAU | | | | | | | | |
| | −20_4-4_bulge-symmetric_UGGU- | GAAUACAACCACGGCUAAU | | | | | | | | |
| | UAGU | UUAGCGCUUUACUAGUCAC | | | | | | | | |
| | −8_6-6_internal_loop- | UGUCGUACAUUGGCCACUC | | | | | | | | |
| | symmetric_GAAUUC-UUAGCG | CCAGU | | | | | | | | |
| | 0_1-1_mismatch_A-C | | | | | | | | | |
| | 4_1-1_mismatch_A-A | | | | | | | | | |
| | 38_6-6_internal_loop- | | | | | | | | | |
| | symmetric_GGGAGU-UAGCGG | | | | | | | | | |
| 2503 | −33_4-4_bulge-symmetric_UUCG- | GCCACAUGGGAGUCCUUGG | −8 | 38 | 0.173 | 0.898 | 0.894 | 0.6 | 0.669 | 0.692 |
| | ACAU | CCUUUGAAAGUCCUUUCAU | | | | | | | | |
| | −20_4-4_bulge-symmetric_UGGU- | GAUACAUCCACGGCUAAUC | | | | | | | | |
| | UAGU | CUUGGCUUUACUAGUCACU | | | | | | | | |
| | −8_6-6_internal_loop- | GUCGUACAUUGGCCACUCCC | | | | | | | | |
| | symmetric_GAAUUC-CCUUGG | AGU | | | | | | | | |
| | 0_1-1_mismatch_A-C | | | | | | | | | |
| | 10_1-0_bulge-asymmetric_U- | | | | | | | | | |
| | 38_6-6_internal_loop- | | | | | | | | | |
| | symmetric_GGGAGU-UGGGAG | | | | | | | | | |
| 2504 | −33_4-4_bulge-symmetric_UUCG- | GCCACACAGACCUCCUACAC | −8 | 28 | 0.018 | 0.828 | 0.846 | 0.941 | 1.632 | 1.613 |
| | ACAU | GGUUGAAAGUCCAUUCAUG | | | | | | | | |
| | −20_4-4_bulge-symmetric_UGGU- | AACAUCCACGGCUAAUUUC | | | | | | | | |
| | UAGU | AAGCUUUACUAGUCACUGU | | | | | | | | |
| | −8_6-6_internal_loop- | CGUACAUUGGCCACUCCCAG | | | | | | | | |
| | symmetric_GAAUUC-UUCAAG | U | | | | | | | | |
| | 0_1-1_mismatch_A-C | | | | | | | | | |
| | 8_2-0_bulge-asymmetric_AU- | | | | | | | | | |
| | 17_1-1_mismatch_A-A | | | | | | | | | |
| | 28_6-6_internal_loop- | | | | | | | | | |
| | symmetric_AGGCCA-ACACGG | | | | | | | | | |
| | 40_4-4_bulge-symmetric_GAGU- | | | | | | | | | |
| | CAGA | | | | | | | | | |
| 2505 | −33_4-4_bulge-symmetric_UUCG- | GCCACACAGACCUCCUGAAU | −6 | 28 | 0.08 | 0.919 | 0.924 | 0.958 | 1.664 | 1.664 |
| | ACAU | ACUUGAAAGUCCUGUCAUG | | | | | | | | |
| | −20_4-4_bulge-symmetric_UGGU- | AAUACAUCCACGACUACCG | | | | | | | | |
| | UAGU | UCAUCCUUUACUAGUCACU | | | | | | | | |
| | −6_6-6_internal_loop- | GUCGUACAUUGGCCACUCCC | | | | | | | | |
| | symmetric_AUUCAU-CCGUCA | AGU | | | | | | | | |
| | −2_1-1_mismatch_C-A | | | | | | | | | |
| | 0_1-1_mismatch_A-C | | | | | | | | | |
| | 16_1-1_mismatch_A-G | | | | | | | | | |
| | 28_6-6_internal_loop- | | | | | | | | | |
| | symmetric_AGGCCA-GAAUAC | | | | | | | | | |
| | 40_4-4_bulge-symmetric_GAGU- | | | | | | | | | |
| | CAGA | | | | | | | | | |
| 2506 | −33_4-4_bulge-symmetric_UUCG- | GCCACACAGACCUCCUUGGC | −18 | 24 | 0.045 | 0.928 | 0.907 | 0.908 | 1.714 | 1.695 |
| | ACAU | GCGAUUAAGUCCCCUUCAU | | | | | | | | |
| | −18_6-6_internal_loop- | GAAUACAUCCACGGGUACU | | | | | | | | |
| | symmetric_UGGUGU-UGUUGU | GAAUUCCUUUUGUUGUCAC | | | | | | | | |
| | −6_1-1_mismatch_U-C | UGUCGUACAUUGGCCACUC | | | | | | | | |
| | −3_1-1_mismatch_G-G | CCAGU | | | | | | | | |
| | 0_1-1_mismatch_A-C | | | | | | | | | |
| | 17_1-2_bulge-asymmetric_A-CC | | | | | | | | | |
| | 24_6-6_internal_loop- | | | | | | | | | |
| | symmetric_UCAAAG-GCGAUU | | | | | | | | | |
| | 40_4-4_bulge-symmetric_GAGU- | | | | | | | | | |
| | CAGA | | | | | | | | | |
| 2507 | −33_4-4_bulge-symmetric_UUCG- | GCCACACAGACCUCCUUGGC | −8 | 24 | 0.03 | 0.619 | 0.684 | 0.932 | 1.427 | 1.439 |
| | ACAU | AGCGAUAAGUCCGUUCAUG | | | | | | | | |
| | −20_4-4_bulge-symmetric_UGGU- | AAAAGAUCCACGGCUAAUC | | | | | | | | |
| | UAGU | CACGACUUUACUAGUCACU | | | | | | | | |
| | −8_6-6_internal_loop- | GUCGUACAUUGGCCACUCCC | | | | | | | | |
| | symmetric_GAAUUC-CCACGA | AGU | | | | | | | | |
| | 0_1-1_mismatch_A-C | | | | | | | | | |
| | 6_1-1_mismatch_G-G | | | | | | | | | |
| | 8_1-1_mismatch_A-A | | | | | | | | | |
| | 17_1-1_mismatch_A-G | | | | | | | | | |
| | 24_6-6_internal_loop- | | | | | | | | | |
| | symmetric_UCAAAG-AGCGAU | | | | | | | | | |
| | 40_4-4_bulge-symmetric_GAGU- | | | | | | | | | |
| | CAGA | | | | | | | | | |
| 2508 | −33_4-4_bulge-symmetric_UUCG- | GCCACACAGACCUCGAACGA | −8 | 30 | 0.401 | 0.881 | 0.88 | 1.27 | 1.516 | 1.585 |
| | ACAU | CUUUGAAAGUCCUUUCAUG | | | | | | | | |
| | −20_4-4_bulge-symmetric_UGGU- | AAUAGAUCCACGGCUAAUU | | | | | | | | |
| | UAGU | AUAAGCUUUACUAGUCACU | | | | | | | | |
| | −8_6-6_internal_loop- | GUCGUACAUUGGCCACUCCC | | | | | | | | |
| | symmetric_GAAUUC-UAUAAG | AGU | | | | | | | | |
| | 0_1-1_mismatch_A-C | | | | | | | | | |
| | 6_1-1_mismatch_G-G | | | | | | | | | |
| | 30_6-6_internal_loop- | | | | | | | | | |
| | symmetric_GCCAAG-GAACGA | | | | | | | | | |
| | 40_4-4_bulge-symmetric_GAGU- | | | | | | | | | |
| | CAGA | | | | | | | | | |
| 2509 | −8_6-6_internal_loop- | GCCACACAGACCUCGAACGA | −8 | 30 | 0.661 | 0.902 | 0.841 | 1.38 | 1.465 | 1.491 |
| | symmetric_GAAUUC-UAUAAG | CUUUGAAAGUCCUUUCAUG | | | | | | | | |
| | 0_1-1_mismatch_A-C | AAUAGAUCCACGGCUAAUU | | | | | | | | |
| | 6_1-1_mismatch_G-G | AUAAGCUUUACACCACACU | | | | | | | | |
| | 30_6-6_internal_loop- | GUCGUCGAAUGGCCACUCCC | | | | | | | | |
| | symmetric_GCCAAG-GAACGA | AGU | | | | | | | | |
| | 40_4-4_bulge-symmetric_GAGU- | | | | | | | | | |
| | CAGA | | | | | | | | | |
| 2510 | −33_4-4_bulge-symmetric_UUCG- | GCCACACAGACCUCCUUGGC | −10 | 24 | 0.12 | 0.805 | 0.835 | 1.019 | 1.621 | 1.57 |
| | ACAU | GAUCACAAGUCCUUUCAUG | | | | | | | | |
| | −20_4-4_bulge-symmetric_UGGU- | AAUAAAUCCACGGUUAAUG | | | | | | | | |
| | UAGU | ACCAGUGUUACUAGUCACU | | | | | | | | |
| | −10_6-6_internal_loop- | GUCGUACAUUGGCCACUCCC | | | | | | | | |
| | symmetric_AGGAAU-CCAGUG | AGU | | | | | | | | |
| | −3_1-1_wobble_G-U | | | | | | | | | |
| | 0_1-1_mismatch_A-C | | | | | | | | | |
| | 6_1-1_mismatch_G-A | | | | | | | | | |
| | 24_6-6_internal_loop- | | | | | | | | | |
| | symmetric_UCAAAG-GAUCAC | | | | | | | | | |
| | 40_4-4_bulge-symmetric_GAGU- | | | | | | | | | |
| | CAGA | | | | | | | | | |
| 2511 | −33_4-4_bulge-symmetric_UUCG- | GCCACACAGACCAGGUAUG | −18 | 32 | 0.042 | 0.596 | 0.654 | 0.956 | 1.407 | 1.418 |
| | ACAU | CCUUUGAAAGUAGUUCAUG | | | | | | | | |
| | −18_6-6_internal_loop- | AAUACAACCACGGCUACAC | | | | | | | | |
| | symmetric_UGGUGU-CUUGGU | AAUUCCUUUCUUGGUCACU | | | | | | | | |
| | −6_3-3_bulge-symmetric_CAU-CAC | GUCGUACAUUGGCCACUCCC | | | | | | | | |
| | 0_1-1_mismatch_A-C | AGU | | | | | | | | |
| | 4_1-1_mismatch_A-A | | | | | | | | | |
| | 17_3-2_bulge-asymmetric_AGG-AG | | | | | | | | | |
| | 32_6-6_internal_loop- | | | | | | | | | |
| | symmetric_CAAGGA-AGGUAU | | | | | | | | | |
| | 40_4-4_bulge-symmetric_GAGU- | | | | | | | | | |
| | CAGA | | | | | | | | | |
| 2512 | −33_4-4_bulge-symmetric_UUCG- | GCCACACAGACCUCCUUGUU | −8 | 26 | 0.048 | 0.667 | 0.674 | 0.975 | 1.506 | 1.521 |
| | ACAU | GAAGGAAAGUCCUUCGUGA | | | | | | | | |
| | −20_4-4_bulge-symmetric_UGGU- | AUACAUCCACGGCUAAUCU | | | | | | | | |
| | UAGU | GGGGCUUUACUAGUCACUG | | | | | | | | |
| | −8_6-6_internal_loop- | UCGUACAUUGGCCACUCCCA | | | | | | | | |
| | symmetric_GAAUUC-CUGGGG | GU | | | | | | | | |
| | 0_1-1_mismatch_A-C | | | | | | | | | |
| | 13_1-1_wobble_U-G | | | | | | | | | |
| | 17_1-0_bulge-asymmetric_A- | | | | | | | | | |
| | 26_6-6_internal_loop- | | | | | | | | | |
| | symmetric_AAAGGC-UUGAAG | | | | | | | | | |
| | 40_4-4_bulge-symmetric_GAGU- | | | | | | | | | |
| | CAGA | | | | | | | | | |
| 2513 | −33_4-4_bulge-symmetric_UUCG- | GCCACACAGACCUCCUUGUA | −10 | 26 | 0.171 | 0.833 | 0.816 | 0.886 | 1.332 | 1.275 |
| | ACAU | GGAGGAAAGUCCUUUCAUG | | | | | | | | |
| | −20_4-4_bulge-symmetric_UGGU- | AAUACAUGCACGGCUAAUG | | | | | | | | |
| | UAGU | AUCGGUGUUACUAGUCACU | | | | | | | | |
| | −10_6-6_internal_loop- | GUCGUACAUUGGCCACUCCC | | | | | | | | |
| | symmetric_AGGAAU-UCGGUG | AGU | | | | | | | | |
| | 0_1-1_mismatch_A-C | | | | | | | | | |
| | 3_1-1_mismatch_G-G | | | | | | | | | |
| | 26_6-6_internal_loop- | | | | | | | | | |
| | symmetric_AAAGGC-UAGGAG | | | | | | | | | |
| | 40_4-4_bulge-symmetric_GAGU- | | | | | | | | | |
| | CAGA | | | | | | | | | |
| 2514 | −33_4-4_bulge-symmetric_UUCG- | GCCACACAGACCAUAGACGC | −18 | 32 | 0.193 | 0.934 | 0.939 | 0.896 | 1.261 | 1.351 |
| | ACAU | CUUUGAAAGUGCUUUCAUG | | | | | | | | |
| | −18_6-6_internal_loop- | AAUACAUCCACGGCUACUG | | | | | | | | |
| | symmetric_UGGUGU-CUUGGU | AAUUCCUUUCUUGGUCACU | | | | | | | | |
| | −6_1-1_mismatch_U-C | GUCGUACAUUGGCCACUCCC | | | | | | | | |
| | 0_1-1_mismatch_A-C | AGU | | | | | | | | |
| | 19_1-1_mismatch_G-G | | | | | | | | | |
| | 32_6-6_internal_loop- | | | | | | | | | |
| | symmetric_CAAGGA-AUAGAC | | | | | | | | | |
| | 40_4-4_bulge-symmetric_GAGU- | | | | | | | | | |
| | CAGA | | | | | | | | | |
| 2515 | −33_4-4_bulge-symmetric_UUCG- | GCCACACAGACCUCCUUGGC | −6 | 24 | 0.065 | 0.919 | 0.91 | 0.957 | 1.698 | 1.683 |
| | ACAU | GGCAUCAAGUAAUUUCAUG | | | | | | | | |
| | −20_4-4_bulge-symmetric_UGGU- | AAUACAUCCACGGCUACGA | | | | | | | | |
| | UAGU | CGGUCCUUUACUAGUCACU | | | | | | | | |
| | −6_6-6_internal_loop- | GUCGUACAUUGGCCACUCCC | | | | | | | | |
| | symmetric_AUUCAU-CGACGG | AGU | | | | | | | | |
| | 0_1-1_mismatch_A-C | | | | | | | | | |
| | 18_2-2_bulge-symmetric_GG-AA | | | | | | | | | |
| | 24_6-6_internal_loop- | | | | | | | | | |
| | symmetric_UCAAAG-GGCAUC | | | | | | | | | |
| | 40_4-4_bulge-symmetric_GAGU- | | | | | | | | | |
| | CAGA | | | | | | | | | |
| 2516 | −33_4-4_bulge-symmetric_UUCG- | GCCACACAGACCGGAAAUG | −10 | 32 | 0.036 | 0.529 | 0.578 | 0.914 | 1.32 | 1.311 |
| | ACAU | CCUUUGAAAGUCCCGCCAU | | | | | | | | |
| | −20_4-4_bulge-symmetric_UGGU- | GAAUAAUUCCACGGCUAUG | | | | | | | | |
| | UAGU | GACGAUGGUUACUAGUCAC | | | | | | | | |
| | −10_6-6_internal_loop- | UGUCGUACAUUGGCCACUC | | | | | | | | |
| | symmetric_AGGAAU-CGAUGG | CCAGU | | | | | | | | |
| | −6_2-2_bulge-symmetric_AU-UG | | | | | | | | | |
| | 0_1-1_mismatch_A-C | | | | | | | | | |
| | 5_2-2_bulge-symmetric_UG-AU | | | | | | | | | |
| | 15_3-3_bulge-symmetric_AAA-CGC | | | | | | | | | |
| | 32_6-6_internal_loop- | | | | | | | | | |
| | symmetric_CAAGGA-GGAAAU | | | | | | | | | |
| | 40_4-4_bulge-symmetric_GAGU- | | | | | | | | | |
| | CAGA | | | | | | | | | |
| 2517 | −33_4-4_bulge-symmetric_UUCG- | GCCACACAGACCUCCUUGGC | −8 | 24 | 0.033 | 0.888 | 0.883 | 0.921 | 1.638 | 1.596 |
| | ACAU | GGCGCCAAGUGAUUUGAUG | | | | | | | | |
| | −20_4-4_bulge-symmetric_UGGU- | AAUACAUCCACGGCUAGUU | | | | | | | | |
| | UAGU | UCCAACUUUACUAGUCACU | | | | | | | | |
| | −8_6-6_internal_loop- | GUCGUACAUUGGCCACUCCC | | | | | | | | |
| | symmetric_GAAUUC-UUCCAA | AGU | | | | | | | | |
| | −6_1-1_wobble_U-G | | | | | | | | | |
| | 0_1-1_mismatch_A-C | | | | | | | | | |
| | 14_1-1_mismatch_G-G | | | | | | | | | |
| | 18_2-2_bulge-symmetric_GG-GA | | | | | | | | | |
| | 24_6-6_internal_loop- | | | | | | | | | |
| | symmetric_UCAAAG-GGCGCC | | | | | | | | | |
| | 40_4-4_bulge-symmetric_GAGU- | | | | | | | | | |
| | CAGA | | | | | | | | | |
| 2518 | −33_4-4_bulge-symmetric_UUCG- | GCCACACAGACCUCCUUGGC | −12 | 24 | 0.025 | 0.835 | 0.813 | 0.916 | 1.552 | 1.472 |
| | ACAU | ACGGUUAAGUCCUUCGAUG | | | | | | | | |
| | −20_4-4_bulge-symmetric_UGGU- | AAUACGUCCACGGCUUUUG | | | | | | | | |
| | UAGU | AAUGCAUCGACUAGUCACU | | | | | | | | |
| | −12_6-6_internal_loop- | GUCGUACAUUGGCCACUCCC | | | | | | | | |
| | symmetric_AAAGGA-GCAUCG | AGU | | | | | | | | |
| | −5_2-2_bulge-symmetric_UU-UU | | | | | | | | | |
| | 0_1-1_mismatch_A-C | | | | | | | | | |
| | 5_1-1_wobble_U-G | | | | | | | | | |
| | 14_2-2_bulge-symmetric_GA-CG | | | | | | | | | |
| | 24_6-6_internal_loop- | | | | | | | | | |
| | symmetric_UCAAAG-ACGGUU | | | | | | | | | |
| | 40_4-4_bulge-symmetric_GAGU- | | | | | | | | | |
| | CAGA | | | | | | | | | |
| 2519 | −33_4-4_bulge-symmetric_UUCG- | GCCACACAGACCUCCUUGAU | −8 | 26 | 0.177 | 0.901 | 0.889 | 0.964 | 1.635 | 1.579 |
| | ACAU | AGUGGAAAGUCCUUUCAUG | | | | | | | | |
| | −20_4-4_bulge-symmetric_UGGU- | AAUACAUCCACGGGUAAUC | | | | | | | | |
| | UAGU | GCCGACUUUACUAGUCACU | | | | | | | | |
| | −8_6-6_internal_loop- | GUCGUACAUUGGCCACUCCC | | | | | | | | |
| | symmetric_GAAUUC-CGCCGA | AGU | | | | | | | | |
| | −3_1-1_mismatch_G-G | | | | | | | | | |
| | 0_1-1_mismatch_A-C | | | | | | | | | |
| | 26_6-6_internal_loop- | | | | | | | | | |
| | symmetric_AAAGGC-AUAGUG | | | | | | | | | |
| | 40_4-4_bulge-symmetric_GAGU- | | | | | | | | | |
| | CAGA | | | | | | | | | |
| 2520 | −33_4-4_bulge-symmetric_UUCG- | GCCACACAGACCUCAAGAU | −20 | 30 | 0.248 | 0.945 | 0.928 | 1.104 | 1.55 | 1.561 |
| | ACAU | ACUUUGAAAGUCCUUUCAU | | | | | | | | |
| | −20_6-6_internal_loop- | GCAUACAUUCACGGCUAAU | | | | | | | | |
| | symmetric_UGUGGU-UGAUUU | GAAUUCCUUUACUGAUUUC | | | | | | | | |
| | 0_1-1_mismatch_A-C | UGUCGUACAUUGGCCACUC | | | | | | | | |
| | 3_1-1_wobble_G-U | CCAGU | | | | | | | | |
| | 10_1-1_mismatch_U-C | | | | | | | | | |
| | 30_6-6_internal_loop- | | | | | | | | | |
| | symmetric_GCCAAG-AAGAUA | | | | | | | | | |
| | 40_4-4_bulge-symmetric_GAGU- | | | | | | | | | |
| | CAGA | | | | | | | | | |
| 2521 | −33_4-4_bulge-symmetric_UUCG- | GCCACAUGGGCAUCCUUGG | −4 | 38 | 0.4 | 0.926 | 0.912 | 0.86 | 0.74 | 0.794 |
| | ACAU | CCUUUGAAAGUCCUUUCAU | | | | | | | | |
| | −20_4-4_bulge-symmetric_UGGU- | GUAUACAUCCACGGCAGUU | | | | | | | | |
| | UAGU | ACAUUCCUUUACUAGUCAC | | | | | | | | |
| | −4_6-6_internal_loop- | UGUCGUACAUUGGCCACUC | | | | | | | | |
| | symmetric_UCAUUA-AGUUAC | CCAGU | | | | | | | | |
| | 0_1-1_mismatch_A-C | | | | | | | | | |
| | 10_1-1_mismatch_U-U | | | | | | | | | |
| | 38_6-6_internal_loop- | | | | | | | | | |
| | symmetric_GGGAGU-UGGGCA | | | | | | | | | |
| 2522 | −33_4-4_bulge-symmetric_UUCG- | GCCACACAGACCUCCUUGGC | −6 | 24 | 0.047 | 0.808 | 0.799 | 0.96 | 1.627 | 1.578 |
| | ACAU | GACAACAAGUCCUCUCAUG | | | | | | | | |
| | −20_4-4_bulge-symmetric_UGGU- | AAUAAUUCCACGGCUACCG | | | | | | | | |
| | UAGU | UUCUCCUUUACUAGUCACU | | | | | | | | |
| | −6_6-6_internal_loop- | GUCGUACAUUGGCCACUCCC | | | | | | | | |
| | symmetric_AUUCAU-CCGUUC | AGU | | | | | | | | |
| | 0_1-1_mismatch_A-C | | | | | | | | | |
| | 5_2-2_bulge-symmetric_UG-AU | | | | | | | | | |
| | 16_1-1_mismatch_A-C | | | | | | | | | |
| | 24_6-6_internal_loop- | | | | | | | | | |
| | symmetric_UCAAAG-GACAAC | | | | | | | | | |
| | 40_4-4_bulge-symmetric_GAGU- | | | | | | | | | |
| | CAGA | | | | | | | | | |
| 2523 | −33_4-4_bulge-symmetric_UUCG- | GCCACAUGGGGGUCCUUGG | −10 | 38 | 0.254 | 0.843 | 0.835 | 0.487 | 0.701 | 0.671 |
| | ACAU | CCUUUGAAAGUCCUUUCAU | | | | | | | | |
| | −20_4-4_bulge-symmetric_UGGU- | GAAUAUAUCCACGGCUAAU | | | | | | | | |
| | UAGU | GACGAUUAUUACUAGUCAC | | | | | | | | |
| | −10_6-6_internal_loop- | UGUCGUACAUUGGCCACUC | | | | | | | | |
| | symmetric_AGGAAU-CGAUUA | CCAGU | | | | | | | | |
| | 0_1-1_mismatch_A-C | | | | | | | | | |
| | 6_1-1_wobble_G-U | | | | | | | | | |
| | 38_6-6_internal_loop- | | | | | | | | | |
| | symmetric_GGGAGU-UGGGGG | | | | | | | | | |
| 2524 | −33_4-4_bulge-symmetric_UUCG- | GCCACACAGACCUCCUUGUA | −6 | 26 | 0.202 | 0.838 | 0.871 | 1.07 | 1.589 | 1.634 |
| | ACAU | GUGCGAAAGUCCUUUCAUG | | | | | | | | |
| | −20_4-4_bulge-symmetric_UGGU- | AAUAAGAUCCACGGCUACG | | | | | | | | |
| | UAGU | UAACUCCUUUACUAGUCAC | | | | | | | | |
| | −6_6-6_internal_loop- | UGUCGUACAUUGGCCACUC | | | | | | | | |
| | symmetric_AUUCAU-CGUAAC | CCAGU | | | | | | | | |
| | 0_1-1_mismatch_A-C | | | | | | | | | |
| | 6_1-2_bulge-asymmetric_G-AG | | | | | | | | | |
| | 26_6-6_internal_loop- | | | | | | | | | |
| | symmetric_AAAGGC-UAGUGC | | | | | | | | | |
| | 40_4-4_bulge-symmetric_GAGU- | | | | | | | | | |
| | CAGA | | | | | | | | | |
| 2525 | −33_4-4_bulge-symmetric_UUCG- | GCCACACAGACCUCCUAAUA | −18 | 28 | 0.076 | 0.905 | 0.913 | 0.913 | 1.561 | 1.65 |
| | ACAU | AAUUGAAAGUCCUUUCAAG | | | | | | | | |
| | −18_6-6_internal_loop- | AAUACAUCCACGGCUAAUG | | | | | | | | |
| | symmetric_UGGUGU-UUGUUU | AAUUCCUUUUUGUUUCACU | | | | | | | | |
| | 0_1-1_mismatch_A-C | GUCGUACAUUGGCCACUCCC | | | | | | | | |
| | 12_1-1_mismatch_A-A | AGU | | | | | | | | |
| | 28_6-6_internal_loop- | | | | | | | | | |
| | symmetric_AGGCCA-AAUAAA | | | | | | | | | |
| | 40_4-4_bulge-symmetric_GAGU- | | | | | | | | | |
| | CAGA | | | | | | | | | |
| 2526 | −33_4-4_bulge-symmetric_UUCG- | GCCACACAGACCUCCUUGAA | −12 | 26 | 0.021 | 0.624 | 0.64 | 0.931 | 1.4 | 1.365 |
| | ACAU | UAGGGAAAGUCCAUAUUCA | | | | | | | | |
| | −20_4-4_bulge-symmetric_UGGU- | UGAAUACCCCCACGGCUAA | | | | | | | | |
| | UAGU | UGAAUGGACCGACUAGUCA | | | | | | | | |
| | −12_6-6_internal_loop- | CUGUCGUACAUUGGCCACU | | | | | | | | |
| | symmetric_AAAGGA-GGACCG | CCCAGU | | | | | | | | |
| | 0_1-1_mismatch_A-C | | | | | | | | | |
| | 4_2-2_bulge-symmetric_AU-CC | | | | | | | | | |
| | 17_1-3_bulge-asymmetric_A-AUA | | | | | | | | | |
| | 26_6-6_internal_loop- | | | | | | | | | |
| | symmetric_AAAGGC-AAUAGG | | | | | | | | | |
| | 40_4-4_bulge-symmetric_GAGU- | | | | | | | | | |
| | CAGA | | | | | | | | | |
| 2527 | −33_4-4_bulge-symmetric_UUCG- | GCCACACAGACCAAUGCUGC | −8 | 32 | 0.06 | 0.728 | 0.792 | 0.921 | 1.176 | 1.22 |
| | ACAU | CUUUGAAAGUCCUUUGCAU | | | | | | | | |
| | −20_4-4_bulge-symmetric_UGGU- | CAUUACAUCCACGGCUAAU | | | | | | | | |
| | UAGU | AGGCGGCUUUACUAGUCAC | | | | | | | | |
| | −8_6-6_internal_loop- | UGUCGUACAUUGGCCACUC | | | | | | | | |
| | symmetric_GAAUUC-AGGCGG | CCAGU | | | | | | | | |
| | 0_1-1_mismatch_A-C | | | | | | | | | |
| | 9_3-3_bulge-symmetric_UUC-CAU | | | | | | | | | |
| | 14_0-1_bulge-asymmetric_-G | | | | | | | | | |
| | 32_6-6_internal_loop- | | | | | | | | | |
| | symmetric_CAAGGA-AAUGCU | | | | | | | | | |
| | 40_4-4_bulge-symmetric_GAGU- | | | | | | | | | |
| | CAGA | | | | | | | | | |
| 2528 | −33_4-4_bulge-symmetric_UUCG- | GCCACACAGACCUCCUCUCA | −18 | 28 | 0.022 | 0.928 | 0.919 | 0.923 | 1.705 | 1.664 |
| | ACAU | UCUUGAAAGUCGACUUUCA | | | | | | | | |
| | −18_6-6_internal_loop- | UGAAUACAUCCACGGAAUG | | | | | | | | |
| | symmetric_UGGUGU-UGUAAU | AAUUCCUUUUGUAAUCACU | | | | | | | | |
| | −3_2-0_bulge-asymmetric_AG- | GUCGUACAUUGGCCACUCCC | | | | | | | | |
| | 0_1-1_mismatch_A-C | AGU | | | | | | | | |
| | 18_0-2_bulge-asymmetric_-GA | | | | | | | | | |
| | 28_6-6_internal_loop- | | | | | | | | | |
| | symmetric_AGGCCA-CUCAUC | | | | | | | | | |
| | 40_4-4_bulge-symmetric_GAGU- | | | | | | | | | |
| | CAGA | | | | | | | | | |
| 2529 | −33_4-4_bulge-symmetric_UUCG- | GCCACACAGACCUCCUCUCG | −6 | 28 | 0.016 | 0.716 | 0.791 | 0.939 | 1.544 | 1.603 |
| | ACAU | ACUUGAAAGUCCCUUUCAU | | | | | | | | |
| | −20_4-4_bulge-symmetric_UGGU- | GAAUUUCUCCACGGCUACG | | | | | | | | |
| | UAGU | ACUGUCCUUUACUAGUCAC | | | | | | | | |
| | −6_6-6_internal_loop- | UGUCGUACAUUGGCCACUC | | | | | | | | |
| | symmetric_AUUCAU-CGACUG | CCAGU | | | | | | | | |
| | 0_1-1_mismatch_A-C | | | | | | | | | |
| | 5_3-3_bulge-symmetric_UGU-UUC | | | | | | | | | |
| | 19_0-1_bulge-asymmetric_-C | | | | | | | | | |
| | 28_6-6_internal_loop- | | | | | | | | | |
| | symmetric_AGGCCA-CUCGAC | | | | | | | | | |
| | 40_4-4_bulge-symmetric_GAGU- | | | | | | | | | |
| | CAGA | | | | | | | | | |
| 2530 | −33_4-4_bulge-symmetric_UUCG- | GCCACACAGACCUCCUUGUA | −8 | 26 | 0.033 | 0.775 | 0.765 | 0.913 | 1.564 | 1.514 |
| | ACAU | UAUCGAAAGUCCUUUAAUG | | | | | | | | |
| | −20_4-4_bulge-symmetric_UGGU- | AAUAGAAUCCACGGCUAAU | | | | | | | | |
| | UAGU | CCUUGGCUUUACUAGUCAC | | | | | | | | |
| | −8_6-6_internal_loop- | UGUCGUACAUUGGCCACUC | | | | | | | | |
| | symmetric_GAAUUC-CCUUGG | CCAGU | | | | | | | | |
| | 0_1-1_mismatch_A-C | | | | | | | | | |
| | 6_1-2_bulge-asymmetric_G-GA | | | | | | | | | |
| | 14_1-1_mismatch_G-A | | | | | | | | | |
| | 26_6-6_internal_loop- | | | | | | | | | |
| | symmetric_AAAGGC-UAUAUC | | | | | | | | | |
| | 40_4-4_bulge-symmetric_GAGU- | | | | | | | | | |
| | CAGA | | | | | | | | | |
| 2531 | −33_4-4_bulge-symmetric_UUCG- | GCCACACAGACCUCGCAUCA | −6 | 30 | 0.091 | 0.898 | 0.888 | 0.985 | 1.545 | 1.603 |
| | ACAU | CUUUGAAAGUACUUUCAUU | | | | | | | | |
| | −20_4-4_bulge-symmetric_UGGU- | AAUACAUCCACGGCUACGU | | | | | | | | |
| | UAGU | CGCUCCUUUACUAGUCACU | | | | | | | | |
| | −6_6-6_internal_loop- | GUCGUACAUUGGCCACUCCC | | | | | | | | |
| | symmetric_AUUCAU-CGUCGC | AGU | | | | | | | | |
| | 0_1-1_mismatch_A-C | | | | | | | | | |
| | 11_1-1_mismatch_C-U | | | | | | | | | |
| | 19_1-1_mismatch_G-A | | | | | | | | | |
| | 30_6-6_internal_loop- | | | | | | | | | |
| | symmetric_GCCAAG-GCAUCA | | | | | | | | | |
| | 40_4-4_bulge-symmetric_GAGU- | | | | | | | | | |
| | CAGA | | | | | | | | | |
| 2532 | −33_4-4_bulge-symmetric_UUCG- | GCCACACAGACCUCCUUGGC | −10 | 24 | 0.197 | 0.867 | 0.855 | 1.056 | 1.612 | 1.515 |
| | ACAU | AAGUCCAAGUCCUUUCAUC | | | | | | | | |
| | −20_4-4_bulge-symmetric_UGGU- | AAUACAUCCACGGCCAUGA | | | | | | | | |
| | UAGU | CGCGGGUUACUAGUCACUG | | | | | | | | |
| | −10_6-6_internal_loop- | UCGUACAUUGGCCACUCCCA | | | | | | | | |
| | symmetric_AGGAAU-CGCGGG | GU | | | | | | | | |
| | −4_2-1_bulge-asymmetric_UA-C | | | | | | | | | |
| | 0_1-1_mismatch_A-C | | | | | | | | | |
| | 11_1-1_mismatch_C-C | | | | | | | | | |
| | 24_6-6_internal_loop- | | | | | | | | | |
| | symmetric_UCAAAG-AAGUCC | | | | | | | | | |
| | 40_4-4_bulge-symmetric_GAGU- | | | | | | | | | |
| | CAGA | | | | | | | | | |
| 2533 | −33_4-4_bulge-symmetric_UUCG- | GCCACACAGACCAGAAGUG | −8 | 32 | 0.452 | 0.943 | 0.923 | 1.176 | 1.121 | 1.198 |
| | ACAU | CCUUUGAAAGUCCUUUCAU | | | | | | | | |
| | −20_4-4_bulge-symmetric_UGGU- | GAAUACAACCACGGCUAAU | | | | | | | | |
| | UAGU | UUGGUACUUUACUAGUCAC | | | | | | | | |
| | −8_6-6_internal_loop- | UGUCGUACAUUGGCCACUC | | | | | | | | |
| | symmetric_GAAUUC-UUGGUA | CCAGU | | | | | | | | |
| | 0_1-1_mismatch_A-C | | | | | | | | | |
| | 4_1-1_mismatch_A-A | | | | | | | | | |
| | 32_6-6_internal_loop- | | | | | | | | | |
| | symmetric_CAAGGA-AGAAGU | | | | | | | | | |
| | 40_4-4_bulge-symmetric_GAGU- | | | | | | | | | |
| | CAGA | | | | | | | | | |
| 2534 | −33_4-4_bulge-symmetric_UUCG- | GCCACACAGACCUCCUAAUA | −10 | 28 | 0.137 | 0.808 | 0.822 | 1.026 | 1.582 | 1.603 |
| | ACAU | GGUUGAAAGUCCUUUCGUA | | | | | | | | |
| | −20_4-4_bulge-symmetric_UGGU- | AAUACAUCCACGGCUAAUA | | | | | | | | |
| | UAGU | GAUGAGGCUUACUAGUCAC | | | | | | | | |
| | −10_6-6_internal_loop- | UGUCGUACAUUGGCCACUC | | | | | | | | |
| | symmetric_AGGAAU-UGAGGC | CCAGU | | | | | | | | |
| | −7_0-1_bulge-asymmetric_-A | | | | | | | | | |
| | 0_1-1_mismatch_A-C | | | | | | | | | |
| | 11_1-1_mismatch_C-A | | | | | | | | | |
| | 13_1-1_wobble_U-G | | | | | | | | | |
| | 28_6-6_internal_loop- | | | | | | | | | |
| | symmetric_AGGCCA-AAUAGG | | | | | | | | | |
| | 40_4-4_bulge-symmetric_GAGU- | | | | | | | | | |
| | CAGA | | | | | | | | | |
| 2535 | −33_4-4_bulge-symmetric_UUCG- | GCCACACAGACCUCCUUGGC | −8 | 24 | 0.233 | 0.832 | 0.827 | 1.09 | 1.541 | 1.57 |
| | ACAU | GCGCAUAAGUCCUUUCAUG | | | | | | | | |
| | −20_4-4_bulge-symmetric_UGGU- | AAUACCUCCACGGCUAAUC | | | | | | | | |
| | UAGU | GCCCGCUUUACUAGUCACU | | | | | | | | |
| | −8_6-6_internal_loop- | GUCGUACAUUGGCCACUCCC | | | | | | | | |
| | symmetric_GAAUUC-CGCCCG | AGU | | | | | | | | |
| | 0_1-1_mismatch_A-C | | | | | | | | | |
| | 5_1-1_mismatch_U-C | | | | | | | | | |
| | 24_6-6_internal_loop- | | | | | | | | | |
| | symmetric_UCAAAG-GCGCAU | | | | | | | | | |
| | 40_4-4_bulge-symmetric_GAGU- | | | | | | | | | |
| | CAGA | | | | | | | | | |
| 2536 | −33_4-4_bulge-symmetric_UUCG- | GCCACACAGACCUCCUUGAU | −20 | 26 | 0.118 | 0.919 | 0.94 | 1.031 | 1.738 | 1.768 |
| | ACAU | GGCGGAAAGUCCCUUCAUG | | | | | | | | |
| | −20_6-6_internal_loop- | AAUACUAUCCACGGCUCUA | | | | | | | | |
| | symmetric_UGUGGU-UGGAGU | CAAUUCCUUUACUGGAGUC | | | | | | | | |
| | −5_4-4_bulge-symmetric_CAUU- | UGUCGUACAUUGGCCACUC | | | | | | | | |
| | CUAC | CCAGU | | | | | | | | |
| | 0_1-1_mismatch_A-C | | | | | | | | | |
| | 5_0-1_bulge-asymmetric_-U | | | | | | | | | |
| | 17_1-1_mismatch_A-C | | | | | | | | | |
| | 26_6-6_internal_loop- | | | | | | | | | |
| | symmetric_AAAGGC-AUGGCG | | | | | | | | | |
| | 40_4-4_bulge-symmetric_GAGU- | | | | | | | | | |
| | CAGA | | | | | | | | | |
| 2537 | −33_4-4_bulge-symmetric_UUCG- | GCCACACAGACCUCCUAUAG | −8 | 28 | 0.377 | 0.895 | 0.887 | 1.199 | 1.571 | 1.605 |
| | ACAU | AGUUGAAAGUCCUUUCAUG | | | | | | | | |
| | −20_4-4_bulge-symmetric_UGGU- | AAUACAUCUACGGCUAAUC | | | | | | | | |
| | UAGU | GCCGACUUUACUAGUCACU | | | | | | | | |
| | −8_6-6_internal_loop- | GUCGUACAUUGGCCACUCCC | | | | | | | | |
| | symmetric_GAAUUC-CGCCGA | AGU | | | | | | | | |
| | 0_1-1_mismatch_A-C | | | | | | | | | |
| | 2_1-1_wobble_G-U | | | | | | | | | |
| | 28_6-6_internal_loop- | | | | | | | | | |
| | symmetric_AGGCCA-AUAGAG | | | | | | | | | |
| | 40_4-4_bulge-symmetric_GAGU- | | | | | | | | | |
| | CAGA | | | | | | | | | |
| 2538 | −33_4-4_bulge-symmetric_UUCG- | GCCACACAGACCUCCUCAUG | −18 | 28 | 0.242 | 0.93 | 0.915 | 1.071 | 1.577 | 1.634 |
| | ACAU | AAUUGAAAGUCCUUUCAUG | | | | | | | | |
| | −18_6-6_internal_loop- | AAUACAGACACGGCUAAUG | | | | | | | | |
| | symmetric_UGGUGU-UGUUUU | AAUUCCUUUUGUUUUCACU | | | | | | | | |
| | 0_1-1_mismatch_A-C | GUCGUACAUUGGCCACUCCC | | | | | | | | |
| | 3_2-2_bulge-symmetric_GA-GA | AGU | | | | | | | | |
| | 28_6-6_internal_loop- | | | | | | | | | |
| | symmetric_AGGCCA-CAUGAA | | | | | | | | | |
| | 40_4-4_bulge-symmetric_GAGU- | | | | | | | | | |
| | CAGA | | | | | | | | | |
| 2539 | −33_4-4_bulge-symmetric_UUCG- | GCCACACAGACCUCCUACAA | −18 | 28 | 0.014 | 0.803 | 0.827 | 0.953 | 1.604 | 1.612 |
| | ACAU | GGUUGAAAGUCCUUACAUG | | | | | | | | |
| | −18_6-6_internal_loop- | AAUUCAUCCACGUGUAUUG | | | | | | | | |
| | symmetric_UGGUGU-UGAGGU | AAUUCCUUUUGAGGUCACU | | | | | | | | |
| | −6_1-1_mismatch_U-U | GUCGUACAUUGGCCACUCCC | | | | | | | | |
| | −2_2-2_bulge-symmetric_GC-UG | AGU | | | | | | | | |
| | 0_1-1_mismatch_A-C | | | | | | | | | |
| | 7_1-1_mismatch_U-U | | | | | | | | | |
| | 15_1-1_mismatch_A-A | | | | | | | | | |
| | 28_6-6_internal_loop- | | | | | | | | | |
| | symmetric_AGGCCA-ACAAGG | | | | | | | | | |
| | 40_4-4_bulge-symmetric_GAGU- | | | | | | | | | |
| | CAGA | | | | | | | | | |
| 2540 | −33_4-4_bulge-symmetric_UUCG- | GCCACACAGACCUCCUUGGC | −8 | 24 | 0.093 | 0.854 | 0.873 | 0.93 | 1.673 | 1.631 |
| | ACAU | GACGCCAAGUCCUUUCAUG | | | | | | | | |
| | −20_4-4_bulge-symmetric_UGGU- | AAUACAUCCACGGAUAAUU | | | | | | | | |
| | UAGU | CUUAGCUUUACUAGUCACU | | | | | | | | |
| | −8_6-6_internal_loop- | GUCGUACAUUGGCCACUCCC | | | | | | | | |
| | symmetric_GAAUUC-UCUUAG | AGU | | | | | | | | |
| | −3_1-1_mismatch_G-A | | | | | | | | | |
| | 0_1-1_mismatch_A-C | | | | | | | | | |
| | 24_6-6_internal_loop- | | | | | | | | | |
| | symmetric_UCAAAG-GACGCC | | | | | | | | | |
| | 40_4-4_bulge-symmetric_GAGU- | | | | | | | | | |
| | CAGA | | | | | | | | | |
| 2541 | −33_4-4_bulge-symmetric_UUCG- | GCCACACAGACCUCCUCAUU | −6 | 28 | 0.064 | 0.932 | 0.928 | 0.965 | 1.722 | 1.669 |
| | ACAU | GAUUGAAAGUAAUUUCAUG | | | | | | | | |
| | −20_4-4_bulge-symmetric_UGGU- | AAUACAUCCACGGCUACUA | | | | | | | | |
| | UAGU | CUGUCCUUUACUAGUCACU | | | | | | | | |
| | −6_6-6_internal_loop- | GUCGUACAUUGGCCACUCCC | | | | | | | | |
| | symmetric_AUUCAU-CUACUG | AGU | | | | | | | | |
| | 0_1-1_mismatch_A-C | | | | | | | | | |
| | 18_2-2_bulge-symmetric_GG-AA | | | | | | | | | |
| | 28_6-6_internal_loop- | | | | | | | | | |
| | symmetric_AGGCCA-CAUUGA | | | | | | | | | |
| | 40_4-4_bulge-symmetric_GAGU- | | | | | | | | | |
| | CAGA | | | | | | | | | |
| 2542 | −33_4-4_bulge-symmetric_UUCG- | GCCACACAGACCUCCUUGUU | −8 | 26 | 0.354 | 0.773 | 0.794 | 1.225 | 1.538 | 1.543 |
| | ACAU | AUCGGAAAGUCCUUUCAUG | | | | | | | | |
| | −20_4-4_bulge-symmetric_UGGU- | AAUACAACCACGGCUAAUA | | | | | | | | |
| | UAGU | CCCGGCUUUACUAGUCACU | | | | | | | | |
| | −8_6-6_internal_loop- | GUCGUACAUUGGCCACUCCC | | | | | | | | |
| | symmetric_GAAUUC-ACCCGG | AGU | | | | | | | | |
| | 0_1-1_mismatch_A-C | | | | | | | | | |
| | 4_1-1_mismatch_A-A | | | | | | | | | |
| | 26_6-6_internal_loop- | | | | | | | | | |
| | symmetric_AAAGGC-UUAUCG | | | | | | | | | |
| | 40_4-4_bulge-symmetric_GAGU- | | | | | | | | | |
| | CAGA | | | | | | | | | |
| 2543 | −33_4-4_bulge-symmetric_UUCG- | GCCACACAGACCUCGACUAA | −6 | 30 | 0.279 | 0.929 | 0.917 | 1.146 | 1.697 | 1.692 |
| | ACAU | CUUUGAAAGUCCUUUCAUG | | | | | | | | |
| | −20_4-4_bulge-symmetric_UGGU- | AAUAGCUCCACGGCUACUA | | | | | | | | |
| | UAGU | GUGUCCUUUACUAGUCACU | | | | | | | | |
| | −6_6-6_internal_loop- | GUCGUACAUUGGCCACUCCC | | | | | | | | |
| | symmetric_AUUCAU-CUAGUG | AGU | | | | | | | | |
| | 0_1-1_mismatch_A-C | | | | | | | | | |
| | 5_2-2_bulge-symmetric_UG-GC | | | | | | | | | |
| | 30_6-6_internal_loop- | | | | | | | | | |
| | symmetric_GCCAAG-GACUAA | | | | | | | | | |
| | 40_4-4_bulge-symmetric_GAGU- | | | | | | | | | |
| | CAGA | | | | | | | | | |
| 2544 | −33_4-4_bulge-symmetric_UUCG- | GCCACACAGACCUCCUGUUA | −12 | 28 | 0.079 | 0.883 | 0.84 | 0.96 | 1.57 | 1.517 |
| | ACAU | UGUUGAAAGUAGUUUCAUG | | | | | | | | |
| | −20_4-4_bulge-symmetric_UGGU- | AAUACAGCCACGACUAAUG | | | | | | | | |
| | UAGU | AAUGCGACGACUAGUCACU | | | | | | | | |
| | −12_6-6_internal_loop- | GUCGUACAUUGGCCACUCCC | | | | | | | | |
| | symmetric_AAAGGA-GCGACG | AGU | | | | | | | | |
| | −2_1-1_mismatch_C-A | | | | | | | | | |
| | 0_1-1_mismatch_A-C | | | | | | | | | |
| | 4_1-1_mismatch_A-G | | | | | | | | | |
| | 18_2-2_bulge-symmetric_GG-AG | | | | | | | | | |
| | 28_6-6_internal_loop- | | | | | | | | | |
| | symmetric_AGGCCA-GUUAUG | | | | | | | | | |
| | 40_4-4_bulge-symmetric_GAGU- | | | | | | | | | |
| | CAGA | | | | | | | | | |
| 2545 | −33_4-4_bulge-symmetric_UUCG- | GCCACACAGACCGGACAAGC | −6 | 32 | 0.027 | 0.684 | 0.789 | 0.927 | 1.489 | 1.514 |
| | ACAU | CUUUGAAAGUAACUUCAUA | | | | | | | | |
| | −20_4-4_bulge-symmetric_UGGU- | UCAUCCACGGCUACGUUUC | | | | | | | | |
| | UAGU | UCCUUUACUAGUCACUGUC | | | | | | | | |
| | −6_6-6_internal_loop- | GUACAUUGGCCACUCCCAG | | | | | | | | |
| | symmetric_AUUCAU-CGUUUC | U | | | | | | | | |
| | 0_1-1_mismatch_A-C | | | | | | | | | |
| | 7_5-2_internal_loop- | | | | | | | | | |
| | asymmetric_UAUUC-AU | | | | | | | | | |
| | 17_3-3_bulge-symmetric_AGG-AAC | | | | | | | | | |
| | 32_6-6_internal_loop- | | | | | | | | | |
| | symmetric_CAAGGA-GGACAA | | | | | | | | | |
| | 40_4-4_bulge-symmetric_GAGU- | | | | | | | | | |
| | CAGA | | | | | | | | | |
| 2546 | −33_4-4_bulge-symmetric_UUCG- | GCCACACAGACCUCCUCCAG | −8 | 28 | 0.039 | 0.885 | 0.888 | 0.913 | 1.657 | 1.645 |
| | ACAU | AGUUGAAAGUCCUUUUAUG | | | | | | | | |
| | −20_4-4_bulge-symmetric_UGGU- | AAUACAUCCACGGCUAAUU | | | | | | | | |
| | UAGU | CCUAGCUUUACUAGUCACU | | | | | | | | |
| | −8_6-6_internal_loop- | GUCGUACAUUGGCCACUCCC | | | | | | | | |
| | symmetric_GAAUUC-UCCUAG | AGU | | | | | | | | |
| | 0_1-1_mismatch_A-C | | | | | | | | | |
| | 14_1-1_wobble_G-U | | | | | | | | | |
| | 28_6-6_internal_loop- | | | | | | | | | |
| | symmetric_AGGCCA-CCAGAG | | | | | | | | | |
| | 40_4-4_bulge-symmetric_GAGU- | | | | | | | | | |
| | CAGA | | | | | | | | | |
| 2547 | −33_4-4_bulge-symmetric_UUCG- | GCCACACAGACCUCGACCGA | −8 | 30 | 0.1 | 0.474 | 0.611 | 1.046 | 0.965 | 1.1 |
| | ACAU | CUUUGAAAGUCCUUUCAUG | | | | | | | | |
| | −20_4-4_bulge-symmetric_UGGU- | CCUACAUCCACGGCUAAUCC | | | | | | | | |
| | UAGU | CGAACUUUACUAGUCACUG | | | | | | | | |
| | −8_6-6_internal_loop- | UCGUACAUUGGCCACUCCCA | | | | | | | | |
| | symmetric_GAAUUC-CCCGAA | GU | | | | | | | | |
| | 0_1-1_mismatch_A-C | | | | | | | | | |
| | 9_2-2_bulge-symmetric_UU-CC | | | | | | | | | |
| | 30_6-6_internal_loop- | | | | | | | | | |
| | symmetric_GCCAAG-GACCGA | | | | | | | | | |
| | 40_4-4_bulge-symmetric_GAGU- | | | | | | | | | |
| | CAGA | | | | | | | | | |
| 2548 | −33_4-4_bulge-symmetric_UUCG- | GCCACACAGACCUCACCCCA | −18 | 30 | 0.18 | 0.94 | 0.947 | 1.003 | 1.418 | 1.509 |
| | ACAU | CUUUGAAAGUCCUUUCAUU | | | | | | | | |
| | −18_6-6_internal_loop- | AAUACUUCCACGGCUAAUG | | | | | | | | |
| | symmetric_UGGUGU-UUGUGU | AAUUCCUUUUUGUGUCACU | | | | | | | | |
| | 0_1-1_mismatch_A-C | GUCGUACAUUGGCCACUCCC | | | | | | | | |
| | 5_1-1_mismatch_U-U | AGU | | | | | | | | |
| | 11_1-1_mismatch_C-U | | | | | | | | | |
| | 30_6-6_internal_loop- | | | | | | | | | |
| | symmetric_GCCAAG-ACCCCA | | | | | | | | | |
| | 40_4-4_bulge-symmetric_GAGU- | | | | | | | | | |
| | CAGA | | | | | | | | | |
| 2549 | −33_4-4_bulge-symmetric_UUCG- | GCCACACAGACCUCGAACGA | −6 | 30 | 0.194 | 0.621 | 0.701 | 1.093 | 1.403 | 1.489 |
| | ACAU | CUUUGAAAGUCCUUUCAUG | | | | | | | | |
| | −20_4-4_bulge-symmetric_UGGU- | AAUAGUUCCACGGCUACCA | | | | | | | | |
| | UAGU | AUGUCCUUUACUAGUCACU | | | | | | | | |
| | −6_6-6_internal_loop- | GUCGUACAUUGGCCACUCCC | | | | | | | | |
| | symmetric_AUUCAU-CCAAUG | AGU | | | | | | | | |
| | 0_1-1_mismatch_A-C | | | | | | | | | |
| | 5_2-2_bulge-symmetric_UG-GU | | | | | | | | | |
| | 30_6-6_internal_loop- | | | | | | | | | |
| | symmetric_GCCAAG-GAACGA | | | | | | | | | |
| | 40_4-4_bulge-symmetric_GAGU- | | | | | | | | | |
| | CAGA | | | | | | | | | |
| 2550 | −33_4-4_bulge-symmetric_UUCG- | GCCACACAGACCUCCUAAUG | −8 | 28 | 0.151 | 0.912 | 0.896 | 1.041 | 1.612 | 1.602 |
| | ACAU | AAUUGAAAGUCCUUUCAUG | | | | | | | | |
| | −20_4-4_bulge-symmetric_UGGU- | UAUACAUCCACGGUUAAUC | | | | | | | | |
| | UAGU | ACCGACUUUACUAGUCACU | | | | | | | | |
| | −8_6-6_internal_loop- | GUCGUACAUUGGCCACUCCC | | | | | | | | |
| | symmetric_GAAUUC-CACCGA | AGU | | | | | | | | |
| | −3_1-1_wobble_G-U | | | | | | | | | |
| | 0_1-1_mismatch_A-C | | | | | | | | | |
| | 10_1-1_mismatch_U-U | | | | | | | | | |
| | 28_6-6_internal_loop- | | | | | | | | | |
| | symmetric_AGGCCA-AAUGAA | | | | | | | | | |
| | 40_4-4_bulge-symmetric_GAGU- | | | | | | | | | |
| | CAGA | | | | | | | | | |
| 2551 | −33_4-4_bulge-symmetric_UUCG- | GCCACACAGACCUCCUGUUA | −18 | 28 | 0.03 | 0.599 | 0.572 | 0.916 | 1.411 | 1.411 |
| | ACAU | UAUUGAAAGUGACGACAUG | | | | | | | | |
| | −18_6-6_internal_loop- | AAUACAUCCACGGCUAAUG | | | | | | | | |
| | symmetric_UGGUGU-UGAAAU | AAUUCCUUUUGAAAUCACU | | | | | | | | |
| | 0_1-1_mismatch_A-C | GUCGUACAUUGGCCACUCCC | | | | | | | | |
| | 15_5-5_internal_loop- | AGU | | | | | | | | |
| | symmetric_AAAGG-GACGA | | | | | | | | | |
| | 28_6-6_internal_loop- | | | | | | | | | |
| | symmetric_AGGCCA-GUUAUA | | | | | | | | | |
| | 40_4-4_bulge-symmetric_GAGU- | | | | | | | | | |
| | CAGA | | | | | | | | | |
| 2552 | −33_4-4_bulge-symmetric_UUCG- | GCCACACAGACCUCCUUGUU | −20 | 26 | 0.03 | 0.761 | 0.855 | 0.94 | 1.577 | 1.544 |
| | ACAU | AGCAGAAAGUAUCUUCAUA | | | | | | | | |
| | −20_6-6_internal_loop- | AAUAGAUCCACGGCUAAUG | | | | | | | | |
| | symmetric_UGUGGU-UAGAAU | AAUUCCUUUACUAGAAUCU | | | | | | | | |
| | 0_1-1_mismatch_A-C | GUCGUACAUUGGCCACUCCC | | | | | | | | |
| | 6_1-1_mismatch_G-G | AGU | | | | | | | | |
| | 11_1-1_mismatch_C-A | | | | | | | | | |
| | 17_3-3_bulge-symmetric_AGG-AUC | | | | | | | | | |
| | 26_6-6_internal_loop- | | | | | | | | | |
| | symmetric_AAAGGC-UUAGCA | | | | | | | | | |
| | 40_4-4_bulge-symmetric_GAGU- | | | | | | | | | |
| | CAGA | | | | | | | | | |
| 2553 | −33_4-4_bulge-symmetric_UUCG- | GCCACACAGACCUCCUACAU | −6 | 28 | 0.049 | 0.834 | 0.842 | 0.957 | 1.639 | 1.617 |
| | ACAU | UCUUGAAAGUAGUUUCGUG | | | | | | | | |
| | −20_4-4_bulge-symmetric_UGGU- | AAUACAUCCACGGCUAUUC | | | | | | | | |
| | UAGU | ACCUCCUUUACUAGUCACU | | | | | | | | |
| | −6_6-6_internal_loop- | GUCGUACAUUGGCCACUCCC | | | | | | | | |
| | symmetric_AUUCAU-UUCACC | AGU | | | | | | | | |
| | 0_1-1_mismatch_A-C | | | | | | | | | |
| | 13_1-1_wobble_U-G | | | | | | | | | |
| | 18_2-2_bulge-symmetric_GG-AG | | | | | | | | | |
| | 28_6-6_internal_loop- | | | | | | | | | |
| | symmetric_AGGCCA-ACAUUC | | | | | | | | | |
| | 40_4-4_bulge-symmetric_GAGU- | | | | | | | | | |
| | CAGA | | | | | | | | | |
| 2554 | −33_4-4_bulge-symmetric_UUCG- | GCCACACAGACCAGAGCUGC | −18 | 32 | 0.049 | 0.932 | 0.89 | 0.849 | 1.287 | 1.242 |
| | ACAU | CUUUGAAAGUCCUUUGUUG | | | | | | | | |
| | −18_6-6_internal_loop- | AAUAGAUCCACGGCUAAUG | | | | | | | | |
| | symmetric_UGGUGU-UGGUAU | AAUUCCUUUUGGUAUCACU | | | | | | | | |
| | 0_1-1_mismatch_A-C | GUCGUACAUUGGCCACUCCC | | | | | | | | |
| | 6_1-1_mismatch_G-G | AGU | | | | | | | | |
| | 13_2-2_bulge-symmetric_UG-GU | | | | | | | | | |
| | 32_6-6_internal_loop- | | | | | | | | | |
| | symmetric_CAAGGA-AGAGCU | | | | | | | | | |
| | 40_4-4_bulge-symmetric_GAGU- | | | | | | | | | |
| | CAGA | | | | | | | | | |
| 2555 | −33_4-4_bulge-symmetric_UUCG- | GCCACAUGUAUAUCCUUGG | −6 | 38 | 0.235 | 0.916 | 0.892 | 0.739 | 0.799 | 0.818 |
| | ACAU | CCUUUGAAAGUCCAUUCAU | | | | | | | | |
| | −20_4-4_bulge-symmetric_UGGU- | GAAUACAUCCACGGCUACG | | | | | | | | |
| | UAGU | UCGGUCCUUUACUAGUCAC | | | | | | | | |
| | −6_6-6_internal_loop- | UGUCGUACAUUGGCCACUC | | | | | | | | |
| | symmetric_AUUCAU-CGUCGG | CCAGU | | | | | | | | |
| | 0_1-1_mismatch_A-C | | | | | | | | | |
| | 17_1-1_mismatch_A-A | | | | | | | | | |
| | 38_6-6_internal_loop- | | | | | | | | | |
| | symmetric_GGGAGU-UGUAUA | | | | | | | | | |
| 2556 | −33_4-4_bulge-symmetric_UUCG- | GCCACACAGACCGGAGUUG | −18 | 32 | 0.198 | 0.941 | 0.916 | 0.904 | 1.135 | 1.238 |
| | ACAU | CCUUUGAAAGUCCUUUCAU | | | | | | | | |
| | −18_6-6_internal_loop- | GAAUACACACACGGCAAUG | | | | | | | | |
| | symmetric_UGGUGU-CUCGUU | AAUUCCUUUCUCGUUCACU | | | | | | | | |
| | −4_1-0_bulge-asymmetric_A- | GUCGUACAUUGGCCACUCCC | | | | | | | | |
| | 0_1-1_mismatch_A-C | AGU | | | | | | | | |
| | 3_2-2_bulge-symmetric_GA-CA | | | | | | | | | |
| | 32_6-6_internal_loop- | | | | | | | | | |
| | symmetric_CAAGGA-GGAGUU | | | | | | | | | |
| | 40_4-4_bulge-symmetric_GAGU- | | | | | | | | | |
| | CAGA | | | | | | | | | |
| 2557 | −33_4-4_bulge-symmetric_UUCG- | GCCACACAGACCUCCUAUUG | −12 | 28 | 0.079 | 0.883 | 0.883 | 0.942 | 1.284 | 1.283 |
| | ACAU | ACUUGAAAGUCCAUUCAUG | | | | | | | | |
| | −20_4-4_bulge-symmetric_UGGU- | AAUACAUCCACGGUUUAUG | | | | | | | | |
| | UAGU | AAUGGCAUGACUAGUCACU | | | | | | | | |
| | −12_6-6_internal_loop- | GUCGUACAUUGGCCACUCCC | | | | | | | | |
| | symmetric_AAAGGA-GGCAUG | AGU | | | | | | | | |
| | −5_1-1_mismatch_U-U | | | | | | | | | |
| | −3_1-1_wobble_G-U | | | | | | | | | |
| | 0_1-1_mismatch_A-C | | | | | | | | | |
| | 17_1-1_mismatch_A-A | | | | | | | | | |
| | 28_6-6_internal_loop- | | | | | | | | | |
| | symmetric_AGGCCA-AUUGAC | | | | | | | | | |
| | 40_4-4_bulge-symmetric_GAGU- | | | | | | | | | |
| | CAGA | | | | | | | | | |
| 2558 | −33_4-4_bulge-symmetric_UUCG- | GCCACACAGACCUCCUUGUA | −8 | 26 | 0.02 | 0.758 | 0.771 | 0.926 | 1.581 | 1.552 |
| | ACAU | UGUGGAAAGUCCUUUGCUG | | | | | | | | |
| | −20_4-4_bulge-symmetric_UGGU- | AAUACAUCCACGUGUAAUC | | | | | | | | |
| | UAGU | UCUAACUUUACUAGUCACU | | | | | | | | |
| | −8_6-6_internal_loop- | GUCGUACAUUGGCCACUCCC | | | | | | | | |
| | symmetric_GAAUUC-CUCUAA | AGU | | | | | | | | |
| | −2_2-2_bulge-symmetric_GC-UG | | | | | | | | | |
| | 0_1-1_mismatch_A-C | | | | | | | | | |
| | 13_2-2_bulge-symmetric_UG-GC | | | | | | | | | |
| | 26_6-6_internal_loop- | | | | | | | | | |
| | symmetric_AAAGGC-UAUGUG | | | | | | | | | |
| | 40_4-4_bulge-symmetric_GAGU- | | | | | | | | | |
| | CAGA | | | | | | | | | |
| 2559 | −33_4-4_bulge-symmetric_UUCG- | GCCACACAGACCUCCUUGGC | −8 | 22 | 0.047 | 0.749 | 0.768 | 0.935 | 1.389 | 1.324 |
| | ACAU | CUGGACUUGUCCUUUCACU | | | | | | | | |
| | −20_4-4_bulge-symmetric_UGGU- | AAUACAUGCACGGCUAAUA | | | | | | | | |
| | UAGU | CUAUACUUUACUAGUCACU | | | | | | | | |
| | −8_6-6_internal_loop- | GUCGUACAUUGGCCACUCCC | | | | | | | | |
| | symmetric_GAAUUC-ACUAUA | AGU | | | | | | | | |
| | 0_1-1_mismatch_A-C | | | | | | | | | |
| | 3_1-1_mismatch_G-G | | | | | | | | | |
| | 11_2-2_bulge-symmetric_CA-CU | | | | | | | | | |
| | 22_6-6_internal_loop- | | | | | | | | | |
| | symmetric_UUUCAA-GGACUU | | | | | | | | | |
| | 40_4-4_bulge-symmetric_GAGU- | | | | | | | | | |
| | CAGA | | | | | | | | | |
| 2560 | −33_4-4_bulge-symmetric_UUCG- | GCCACACAGACCAAGCGCGC | −8 | 32 | 0.072 | 0.918 | 0.907 | 0.939 | 1.596 | 1.529 |
| | ACAU | CUUUGAAAGUCCAUUCAUU | | | | | | | | |
| | −20_4-4_bulge-symmetric_UGGU- | AAUAACUCCACGGCUAAUU | | | | | | | | |
| | UAGU | UCUUACUUUACUAGUCACU | | | | | | | | |
| | −8_6-6_internal_loop- | GUCGUACAUUGGCCACUCCC | | | | | | | | |
| | symmetric_GAAUUC-UUCUUA | AGU | | | | | | | | |
| | 0_1-1_mismatch_A-C | | | | | | | | | |
| | 5_2-2_bulge-symmetric_UG-AC | | | | | | | | | |
| | 11_1-1_mismatch_C-U | | | | | | | | | |
| | 17_1-1_mismatch_A-A | | | | | | | | | |
| | 32_6-6_internal_loop- | | | | | | | | | |
| | symmetric_CAAGGA-AAGCGC | | | | | | | | | |
| | 40_4-4_bulge-symmetric_GAGU- | | | | | | | | | |
| | CAGA | | | | | | | | | |
| 2561 | −33_4-4_bulge-symmetric_UUCG- | GCCACACAGACCAAGGUCGC | −6 | 32 | 0.044 | 0.851 | 0.883 | 0.911 | 1.462 | 1.451 |
| | ACAU | CUUUGAAAGUGUUUCAAGA | | | | | | | | |
| | −20_4-4_bulge-symmetric_UGGU- | AUACCUCCACGGCUACGUA | | | | | | | | |
| | UAGU | GAUCCUUUACUAGUCACUG | | | | | | | | |
| | −6_6-6_internal_loop- | UCGUACAUUGGCCACUCCCA | | | | | | | | |
| | symmetric_AUUCAU-CGUAGA | GU | | | | | | | | |
| | 0_1-1_mismatch_A-C | | | | | | | | | |
| | 5_1-1_mismatch_U-C | | | | | | | | | |
| | 12_1-1_mismatch_A-A | | | | | | | | | |
| | 18_2-1_bulge-asymmetric_GG-G | | | | | | | | | |
| | 32_6-6_internal_loop- | | | | | | | | | |
| | symmetric_CAAGGA-AAGGUC | | | | | | | | | |
| | 40_4-4_bulge-symmetric_GAGU- | | | | | | | | | |
| | CAGA | | | | | | | | | |
| 2562 | −33_4-4_bulge-symmetric_UUCG- | GCCACACAGACCUCCUUGGC | −20 | 24 | 0.275 | 0.923 | 0.931 | 1.129 | 1.67 | 1.658 |
| | ACAU | AGGCUCAAGUCCUUUCAUG | | | | | | | | |
| | −20_6-6_internal_loop- | AAUACCCCCACGGCUAAUG | | | | | | | | |
| | symmetric_UGUGGU-UUUUGU | AAUUCCUUUACUUUUGUCU | | | | | | | | |
| | 0_1-1_mismatch_A-C | GUCGUACAUUGGCCACUCCC | | | | | | | | |
| | 4_2-2_bulge-symmetric_AU-CC | AGU | | | | | | | | |
| | 24_6-6_internal_loop- | | | | | | | | | |
| | symmetric_UCAAAG-AGGCUC | | | | | | | | | |
| | 40_4-4_bulge-symmetric_GAGU- | | | | | | | | | |
| | CAGA | | | | | | | | | |
| 2563 | −33_4-4_bulge-symmetric_UUCG- | GCCACACAGACCUCCUUGUA | −20 | 26 | 0.085 | 0.926 | 0.925 | 0.916 | 1.678 | 1.622 |
| | ACAU | AAAGGAAAGUCCUUUCAUG | | | | | | | | |
| | −20_6-6_internal_loop- | AAUACAUCCACGGGUUGAA | | | | | | | | |
| | symmetric_UGUGGU-UGGGGU | UUCCUUUACUGGGGUCUGU | | | | | | | | |
| | −3_4-2_bulge-asymmetric_UUAG-GU | CGUACAUUGGCCACUCCCAG | | | | | | | | |
| | 0_1-1_mismatch_A-C | U | | | | | | | | |
| | 26_6-6_internal_loop- | | | | | | | | | |
| | symmetric_AAAGGC-UAAAAG | | | | | | | | | |
| | 40_4-4_bulge-symmetric_GAGU- | | | | | | | | | |
| | CAGA | | | | | | | | | |
| 2564 | −33_4-4_bulge-symmetric_UUCG- | GCCACACAGACCUCCUUGAA | −8 | 26 | 0.13 | 0.867 | 0.845 | 0.988 | 1.626 | 1.564 |
| | ACAU | GACAGAAAGUUCUUUCAUG | | | | | | | | |
| | −20_4-4_bulge-symmetric_UGGU- | AAUACAUCCACGGCUAAUU | | | | | | | | |
| | UAGU | ACGUACUUUACUAGUCACU | | | | | | | | |
| | −8_6-6_internal_loop- | GUCGUACAUUGGCCACUCCC | | | | | | | | |
| | symmetric_GAAUUC-UACGUA | AGU | | | | | | | | |
| | 0_1-1_mismatch_A-C | | | | | | | | | |
| | 19_1-1_wobble_G-U | | | | | | | | | |
| | 26_6-6_internal_loop- | | | | | | | | | |
| | symmetric_AAAGGC-AAGACA | | | | | | | | | |
| | 40_4-4_bulge-symmetric_GAGU- | | | | | | | | | |
| | CAGA | | | | | | | | | |
| 2565 | −33_4-4_bulge-symmetric_UUCG- | GCCACACAGACCUCCUAACA | −6 | 28 | 0.131 | 0.53 | 0.7 | 1.049 | 1.384 | 1.521 |
| | ACAU | GGUUGAAAGUCCUUUCAUC | | | | | | | | |
| | −20_4-4_bulge-symmetric_UGGU- | UUUACUUCCACGGCUACCG | | | | | | | | |
| | UAGU | UAGUCCUUUACUAGUCACU | | | | | | | | |
| | −6_6-6_internal_loop- | GUCGUACAUUGGCCACUCCC | | | | | | | | |
| | symmetric_AUUCAU-CCGUAG | AGU | | | | | | | | |
| | 0_1-1_mismatch_A-C | | | | | | | | | |
| | 5_1-1_mismatch_U-U | | | | | | | | | |
| | 9_3-3_bulge-symmetric_UUC-CUU | | | | | | | | | |
| | 28_6-6_internal_loop- | | | | | | | | | |
| | symmetric_AGGCCA-AACAGG | | | | | | | | | |
| | 40_4-4_bulge-symmetric_GAGU- | | | | | | | | | |
| | CAGA | | | | | | | | | |
| 2566 | −33_4-4_bulge-symmetric_UUCG- | GCCACACAGACCUCCUUGGC | −12 | 24 | 0.23 | 0.928 | 0.905 | 1.022 | 1.552 | 1.474 |
| | ACAU | AAUAAUAAGUCCUUUCAUG | | | | | | | | |
| | −20_4-4_bulge-symmetric_UGGU- | AAUACAUCCACGGCUAAUA | | | | | | | | |
| | UAGU | AAUAGGACGACUAGUCACU | | | | | | | | |
| | −12_6-6_internal_loop- | GUCGUACAUUGGCCACUCCC | | | | | | | | |
| | symmetric_AAAGGA-AGGACG | AGU | | | | | | | | |
| | −8_1-1_mismatch_C-A | | | | | | | | | |
| | 0_1-1_mismatch_A-C | | | | | | | | | |
| | 24_6-6_internal_loop- | | | | | | | | | |
| | symmetric_UCAAAG-AAUAAU | | | | | | | | | |
| | 40_4-4_bulge-symmetric_GAGU- | | | | | | | | | |
| | CAGA | | | | | | | | | |
| 2567 | −33_4-4_bulge-symmetric_UUCG- | GCCACACAGACCUCCUAUUU | −8 | 28 | 0.053 | 0.624 | 0.625 | 0.945 | 1.428 | 1.423 |
| | ACAU | ACUUGAAAGUCCUGUCAUG | | | | | | | | |
| | −20_4-4_bulge-symmetric_UGGU- | AAUACAUCCACGGCGGUAA | | | | | | | | |
| | UAGU | UCCGGGGCUUUACUAGUCA | | | | | | | | |
| | −8_6-6_internal_loop- | CUGUCGUACAUUGGCCACU | | | | | | | | |
| | symmetric_GAAUUC-CCGGGG | CCCAGU | | | | | | | | |
| | −3_0-2_bulge-asymmetric_-GG | | | | | | | | | |
| | 0_1-1_mismatch_A-C | | | | | | | | | |
| | 16_1-1_mismatch_A-G | | | | | | | | | |
| | 28_6-6_internal_loop- | | | | | | | | | |
| | symmetric_AGGCCA-AUUUAC | | | | | | | | | |
| | 40_4-4_bulge-symmetric_GAGU- | | | | | | | | | |
| | CAGA | | | | | | | | | |
| 2568 | −33_4-4_bulge-symmetric_UUCG- | GCCACACAGACCUCCUCCAU | −18 | 28 | 0.046 | 0.921 | 0.915 | 0.939 | 1.735 | 1.721 |
| | ACAU | UCUUGAAAGUCCUUUUAUG | | | | | | | | |
| | −18_6-6_internal_loop- | AAUAGAUCCACGGCAAAUG | | | | | | | | |
| | symmetric_UGGUGU-UAGUGU | AAUUCCUUUUAGUGUCACU | | | | | | | | |
| | −4_1-1_mismatch_A-A | GUCGUACAUUGGCCACUCCC | | | | | | | | |
| | 0_1-1_mismatch_A-C | AGU | | | | | | | | |
| | 6_1-1_mismatch_G-G | | | | | | | | | |
| | 14_1-1_wobble_G-U | | | | | | | | | |
| | 28_6-6_internal_loop- | | | | | | | | | |
| | symmetric_AGGCCA-CCAUUC | | | | | | | | | |
| | 40_4-4_bulge-symmetric_GAGU- | | | | | | | | | |
| | CAGA | | | | | | | | | |
| 2569 | −33_4-4_bulge-symmetric_UUCG- | GCCACAUGAAAGUCCUUGG | −10 | 38 | 0.147 | 0.892 | 0.88 | 0.586 | 0.702 | 0.759 |
| | ACAU | CCUUUGAAAGUCCUUUGAU | | | | | | | | |
| | −20_4-4_bulge-symmetric_UGGU- | GAAUACAUCCACGGCUACG | | | | | | | | |
| | UAGU | CGACACAGAUUACUAGUCA | | | | | | | | |
| | −10_6-6_internal_loop- | CUGUCGUACAUUGGCCACU | | | | | | | | |
| | symmetric_AGGAAU-CACAGA | CCCAGU | | | | | | | | |
| | −6_2-3_bulge-asymmetric_AU-CGC | | | | | | | | | |
| | 0_1-1_mismatch_A-C | | | | | | | | | |
| | 14_1-1_mismatch_G-G | | | | | | | | | |
| | 38_6-6_internal_loop- | | | | | | | | | |
| | symmetric_GGGAGU-UGAAAG | | | | | | | | | |
| 2570 | −33_4-4_bulge-symmetric_UUCG- | GCCACACAGACCUCCUAACA | −18 | 28 | 0.044 | 0.908 | 0.907 | 0.947 | 1.706 | 1.726 |
| | ACAU | GAUUGAAAGUUAUUCAUGA | | | | | | | | |
| | −18_6-6_internal_loop- | AUACAUCCACGGCUAAUGA | | | | | | | | |
| | symmetric_UGGUGU-UGAAAU | AUUCCUUUUGAAAUCACUG | | | | | | | | |
| | 0_1-1_mismatch_A-C | UCGUACAUUGGCCACUCCCA | | | | | | | | |
| | 17_2-1_bulge-asymmetric_AG-A | GU | | | | | | | | |
| | 19_1-1_wobble_G-U | | | | | | | | | |
| | 28_6-6_internal_loop- | | | | | | | | | |
| | symmetric_AGGCCA-AACAGA | | | | | | | | | |
| | 40_4-4_bulge-symmetric_GAGU- | | | | | | | | | |
| | CAGA | | | | | | | | | |
| 2571 | −33_4-4_bulge-symmetric_UUCG- | GCCACAUGGUUAUCCUUGG | −6 | 38 | 0.021 | 0.542 | 0.647 | 0.9 | 1.298 | 1.376 |
| | ACAU | CCUUUGAAAGUCCUGGUGC | | | | | | | | |
| | −20_4-4_bulge-symmetric_UGGU- | UUGAAUCAAUCCACGGCUA | | | | | | | | |
| | UAGU | CGACAGUCCUUUACUAGUC | | | | | | | | |
| | −6_6-6_internal_loop- | ACUGUCGUACAUUGGCCAC | | | | | | | | |
| | symmetric_AUUCAU-CGACAG | UCCCAGU | | | | | | | | |
| | 0_1-1_mismatch_A-C | | | | | | | | | |
| | 6_2-2_bulge-symmetric_GU-CA | | | | | | | | | |
| | 13_1-1_mismatch_U-U | | | | | | | | | |
| | 15_2-4_bulge-asymmetric_AA-GGUG | | | | | | | | | |
| | 38_6-6_internal_loop- | | | | | | | | | |
| | symmetric_GGGAGU-UGGUUA | | | | | | | | | |
| 2572 | −33_4-4_bulge-symmetric_UUCG- | GCCACAUGGUAGUCCUUGG | −18 | 38 | 0.177 | 0.922 | 0.924 | 0.476 | 0.715 | 0.738 |
| | ACAU | CCUUUGAAAGUCCUUUCAU | | | | | | | | |
| | −18_6-6_internal_loop- | GAAUACAUUCACGGCUCAU | | | | | | | | |
| | symmetric_UGGUGU-UUUGAU | GAAUUCCUUUUUUGAUCAC | | | | | | | | |
| | −5_1-1_mismatch_U-C | UGUCGUACAUUGGCCACUC | | | | | | | | |
| | 0_1-1_mismatch_A-C | CCAGU | | | | | | | | |
| | 3_1-1_wobble_G-U | | | | | | | | | |
| | 38_6-6_internal_loop- | | | | | | | | | |
| | symmetric_GGGAGU-UGGUAG | | | | | | | | | |
| 2573 | −33_4-4_bulge-symmetric_UUCG- | GCCACACAGACCUCCUGUUU | −6 | 28 | 0.032 | 0.733 | 0.762 | 0.924 | 1.516 | 1.519 |
| | ACAU | UAUUGAAAGUCCUUGCAUG | | | | | | | | |
| | −20_4-4_bulge-symmetric_UGGU- | GAUACUCCACGGCUACGAU | | | | | | | | |
| | UAGU | AGUCCUUUACUAGUCACUG | | | | | | | | |
| | −6_6-6_internal_loop- | UCGUACAUUGGCCACUCCCA | | | | | | | | |
| | symmetric_AUUCAU-CGAUAG | GU | | | | | | | | |
| | 0_1-1_mismatch_A-C | | | | | | | | | |
| | 5_1-0_bulge-asymmetric_U- | | | | | | | | | |
| | 10_1-1_wobble_U-G | | | | | | | | | |
| | 15_1-1_mismatch_A-G | | | | | | | | | |
| | 28_6-6_internal_loop- | | | | | | | | | |
| | symmetric_AGGCCA-GUUUUA | | | | | | | | | |
| | 40_4-4_bulge-symmetric_GAGU- | | | | | | | | | |
| | CAGA | | | | | | | | | |
| 2574 | −33_4-4_bulge-symmetric_UUCG- | GCCACACAGACCUCCUUGUA | −6 | 26 | 0.035 | 0.836 | 0.886 | 0.952 | 1.664 | 1.708 |
| | ACAU | GACGGAAAGUGGUUUCAUU | | | | | | | | |
| | −20_4-4_bulge-symmetric_UGGU- | CAUAGAUCCACGGCUACGA | | | | | | | | |
| | UAGU | CGCUCCUUUACUAGUCACU | | | | | | | | |
| | −6_6-6_internal_loop- | GUCGUACAUUGGCCACUCCC | | | | | | | | |
| | symmetric_AUUCAU-CGACGC | AGU | | | | | | | | |
| | 0_1-1_mismatch_A-C | | | | | | | | | |
| | 6_1-1_mismatch_G-G | | | | | | | | | |
| | 10_2-2_bulge-symmetric_UC-UC | | | | | | | | | |
| | 18_2-2_bulge-symmetric_GG-GG | | | | | | | | | |
| | 26_6-6_internal_loop- | | | | | | | | | |
| | symmetric_AAAGGC-UAGACG | | | | | | | | | |
| | 40_4-4_bulge-symmetric_GAGU- | | | | | | | | | |
| | CAGA | | | | | | | | | |
| 2575 | −33_4-4_bulge-symmetric_UUCG- | GCCACACAGACCUCCUUGUA | −10 | 26 | 0.25 | 0.869 | 0.869 | 1.098 | 1.528 | 1.502 |
| | ACAU | AGUAGAAAGUCCUUUCAUG | | | | | | | | |
| | −20_4-4_bulge-symmetric_UGGU- | AAUACCACCACGGCCAAUG | | | | | | | | |
| | UAGU | ACACGACUUACUAGUCACU | | | | | | | | |
| | −10_6-6_internal_loop- | GUCGUACAUUGGCCACUCCC | | | | | | | | |
| | symmetric_AGGAAU-CACGAC | AGU | | | | | | | | |
| | −4_1-1_mismatch_A-C | | | | | | | | | |
| | 0_1-1_mismatch_A-C | | | | | | | | | |
| | 4_2-2_bulge-symmetric_AU-CA | | | | | | | | | |
| | 26_6-6_internal_loop- | | | | | | | | | |
| | symmetric_AAAGGC-UAAGUA | | | | | | | | | |
| | 40_4-4_bulge-symmetric_GAGU- | | | | | | | | | |
| | CAGA | | | | | | | | | |
| 2576 | −33_4-4_bulge-symmetric_UUCG- | GCCACACAGACCUCCUUGGC | −8 | 24 | 0.44 | 0.925 | 0.921 | 1.218 | 1.684 | 1.581 |
| | ACAU | GGGGUUAAGUCCUUUCAUG | | | | | | | | |
| | −20_4-4_bulge-symmetric_UGGU- | AAUACACCCACGGCUAAUCC | | | | | | | | |
| | UAGU | UUGGCUUUACUAGUCACUG | | | | | | | | |
| | −8_6-6_internal_loop- | UCGUACAUUGGCCACUCCCA | | | | | | | | |
| | symmetric_GAAUUC-CCUUGG | GU | | | | | | | | |
| | 0_1-1_mismatch_A-C | | | | | | | | | |
| | 4_1-1_mismatch_A-C | | | | | | | | | |
| | 24_6-6_internal_loop- | | | | | | | | | |
| | symmetric_UCAAAG-GGGGUU | | | | | | | | | |
| | 40_4-4_bulge-symmetric_GAGU- | | | | | | | | | |
| | CAGA | | | | | | | | | |
| 2577 | −33_4-4_bulge-symmetric_UUCG- | GCCACACAGACCUCCUGAAA | −8 | 28 | 0.171 | 0.812 | 0.78 | 1.017 | 1.497 | 1.487 |
| | ACAU | UGUUGAAAGUCCUUUCAUG | | | | | | | | |
| | −20_4-4_bulge-symmetric_UGGU- | AAUACAUCCACGGGUAAUU | | | | | | | | |
| | UAGU | AUACGCUUUACUAGUCACU | | | | | | | | |
| | −8_6-6_internal_loop- | GUCGUACAUUGGCCACUCCC | | | | | | | | |
| | symmetric_GAAUUC-UAUACG | AGU | | | | | | | | |
| | −3_1-1_mismatch_G-G | | | | | | | | | |
| | 0_1-1_mismatch_A-C | | | | | | | | | |
| | 28_6-6_internal_loop- | | | | | | | | | |
| | symmetric_AGGCCA-GAAAUG | | | | | | | | | |
| | 40_4-4_bulge-symmetric_GAGU- | | | | | | | | | |
| | CAGA | | | | | | | | | |
| 2578 | −33_4-4_bulge-symmetric_UUCG- | GCCACACAGACCUCCUUGUA | −8 | 26 | 0.156 | 0.709 | 0.792 | 1.069 | 1.439 | 1.547 |
| | ACAU | GACCGAAAGUCCUUUCAUG | | | | | | | | |
| | −20_4-4_bulge-symmetric_UGGU- | AAUAUCAUCCAUAGCUAAU | | | | | | | | |
| | UAGU | UGCACACUUUACUAGUCAC | | | | | | | | |
| | −8_6-6_internal_loop- | UGUCGUACAUUGGCCACUC | | | | | | | | |
| | symmetric_GAAUUC-UGCACA | CCAGU | | | | | | | | |
| | −1_1-1_mismatch_C-A | | | | | | | | | |
| | 6_0-1_bulge-asymmetric_-U | | | | | | | | | |
| | 26_6-6_internal_loop- | | | | | | | | | |
| | symmetric_AAAGGC-UAGACC | | | | | | | | | |
| | 40_4-4_bulge-symmetric_GAGU- | | | | | | | | | |
| | CAGA | | | | | | | | | |
| 2579 | −33_4-4_bulge-symmetric_UUCG- | GCCACACAGACCUCGCAAUG | −12 | 30 | 0.309 | 0.887 | 0.897 | 1.151 | 1.594 | 1.615 |
| | ACAU | CUUUGAAAGUCCUUUCAUG | | | | | | | | |
| | −20_4-4_bulge-symmetric_UGGU- | AAUAAAUCCACGGCUAAUG | | | | | | | | |
| | UAGU | AAUGAGACGACUAGUCACU | | | | | | | | |
| | −12_6-6_internal_loop- | GUCGUACAUUGGCCACUCCC | | | | | | | | |
| | symmetric_AAAGGA-GAGACG | AGU | | | | | | | | |
| | 0_1-1_mismatch_A-C | | | | | | | | | |
| | 6_1-1_mismatch_G-A | | | | | | | | | |
| | 30_6-6_internal_loop- | | | | | | | | | |
| | symmetric_GCCAAG-GCAAUG | | | | | | | | | |
| | 40_4-4_bulge-symmetric_GAGU- | | | | | | | | | |
| | CAGA | | | | | | | | | |
| 2580 | −33_4-4_bulge-symmetric_UUCG- | GCCACACAGACCUCCUAUCA | −18 | 28 | 0.059 | 0.838 | 0.802 | 0.924 | 1.505 | 1.478 |
| | ACAU | AGUUGAAAGUCCUUUCAGC | | | | | | | | |
| | −18_6-6_internal_loop- | AUACAUCCACGGCUAAUGA | | | | | | | | |
| | symmetric_UGGUGU-UGUUUU | AUUCCUUUUGUUUUCACUG | | | | | | | | |
| | 0_1-1_mismatch_A-C | UCGUACAUUGGCCACUCCCA | | | | | | | | |
| | 10_1-1_mismatch_U-C | GU | | | | | | | | |
| | 12_1-0_bulge-asymmetric_A- | | | | | | | | | |
| | 28_6-6_internal_loop- | | | | | | | | | |
| | symmetric_AGGCCA-AUCAAG | | | | | | | | | |
| | 40_4-4_bulge-symmetric_GAGU- | | | | | | | | | |
| | CAGA | | | | | | | | | |
| 2581 | −33_4-4_bulge-symmetric_UUCG- | GCCACACAGACCUCCUUGGC | −10 | 24 | 0.221 | 0.778 | 0.783 | 1.084 | 1.511 | 1.523 |
| | ACAU | GGAGCCAAGUCCUUUCAUG | | | | | | | | |
| | −20_4-4_bulge-symmetric_UGGU- | AAUACAACCACGGCGACGG | | | | | | | | |
| | UAGU | ACCAGGGUUACUAGUCACU | | | | | | | | |
| | −10_6-6_internal_loop- | GUCGUACAUUGGCCACUCCC | | | | | | | | |
| | symmetric_AGGAAU-CCAGGG | AGU | | | | | | | | |
| | −4_4-4_bulge-symmetric_AUUA- | | | | | | | | | |
| | GACG | | | | | | | | | |
| | 0_1-1_mismatch_A-C | | | | | | | | | |
| | 4_1-1_mismatch_A-A | | | | | | | | | |
| | 24_6-6_internal_loop- | | | | | | | | | |
| | symmetric_UCAAAG-GGAGCC | | | | | | | | | |
| | 40_4-4_bulge-symmetric_GAGU- | | | | | | | | | |
| | CAGA | | | | | | | | | |
| 2582 | −33_4-4_bulge-symmetric_UUCG- | GCCACACAGACCUCCUCUUA | −6 | 28 | 0.077 | 0.688 | 0.716 | 0.989 | 1.49 | 1.502 |
| | ACAU | UAUUGAAAGUCCUUUCAUG | | | | | | | | |
| | −20_4-4_bulge-symmetric_UGGU- | AAUAUAUCGACGGCUACGA | | | | | | | | |
| | UAGU | CAAUCCUUUACUAGUCACU | | | | | | | | |
| | −6_6-6_internal_loop- | GUCGUACAUUGGCCACUCCC | | | | | | | | |
| | symmetric_AUUCAU-CGACAA | AGU | | | | | | | | |
| | 0_1-1_mismatch_A-C | | | | | | | | | |
| | 2_1-1_mismatch_G-G | | | | | | | | | |
| | 6_1-1_wobble_G-U | | | | | | | | | |
| | 28_6-6_internal_loop- | | | | | | | | | |
| | symmetric_AGGCCA-CUUAUA | | | | | | | | | |
| | 40_4-4_bulge-symmetric_GAGU- | | | | | | | | | |
| | CAGA | | | | | | | | | |
| 2583 | −33_4-4_bulge-symmetric_UUCG- | GCCACACAGACCUCCUUGAA | −8 | 26 | 0.028 | 0.57 | 0.619 | 0.928 | 1.412 | 1.408 |
| | ACAU | UCAAGAAAGUCGGUUCAUG | | | | | | | | |
| | −20_4-4_bulge-symmetric_UGGU- | AAUACUCCCACGGCUAAUU | | | | | | | | |
| | UAGU | AGCGACUUUACUAGUCACU | | | | | | | | |
| | −8_6-6_internal_loop- | GUCGUACAUUGGCCACUCCC | | | | | | | | |
| | symmetric_GAAUUC-UAGCGA | AGU | | | | | | | | |
| | 0_1-1_mismatch_A-C | | | | | | | | | |
| | 4_2-2_bulge-symmetric_AU-UC | | | | | | | | | |
| | 17_2-2_bulge-symmetric_AG-GG | | | | | | | | | |
| | 26_6-6_internal_loop- | | | | | | | | | |
| | symmetric_AAAGGC-AAUCAA | | | | | | | | | |
| | 40_4-4_bulge-symmetric_GAGU- | | | | | | | | | |
| | CAGA | | | | | | | | | |
| 2584 | −33_4-4_bulge-symmetric_UUCG- | GCCACACAGACCUCCUUGUA | −18 | 26 | 0.033 | 0.911 | 0.881 | 0.905 | 1.673 | 1.607 |
| | ACAU | GUAGGAAAGUCGUUUCCAU | | | | | | | | |
| | −18_6-6_internal_loop- | GAAUACAUCCACGGCUAAU | | | | | | | | |
| | symmetric_UGGUGU-UUCGUU | GAAUUCCUUUUUCGUUCAC | | | | | | | | |
| | 0_1-1_mismatch_A-C | UGUCGUACAUUGGCCACUC | | | | | | | | |
| | 14_0-1_bulge-asymmetric_-C | CCAGU | | | | | | | | |
| | 18_1-1_mismatch_G-G | | | | | | | | | |
| | 26_6-6_internal_loop- | | | | | | | | | |
| | symmetric_AAAGGC-UAGUAG | | | | | | | | | |
| | 40_4-4_bulge-symmetric_GAGU- | | | | | | | | | |
| | CAGA | | | | | | | | | |
| 2585 | −33_4-4_bulge-symmetric_UUCG- | GCCACACAGACCUCCUUGAA | −8 | 26 | 0.07 | 0.924 | 0.891 | 0.931 | 1.654 | 1.614 |
| | ACAU | AAUGGAAAGUCCUGUCAUU | | | | | | | | |
| | −20_4-4_bulge-symmetric_UGGU- | AAUACAUCCACGGCUAAUU | | | | | | | | |
| | UAGU | UGGGACUUUACUAGUCACU | | | | | | | | |
| | −8_6-6_internal_loop- | GUCGUACAUUGGCCACUCCC | | | | | | | | |
| | symmetric_GAAUUC-UUGGGA | AGU | | | | | | | | |
| | 0_1-1_mismatch_A-C | | | | | | | | | |
| | 11_1-1_mismatch_C-U | | | | | | | | | |
| | 16_1-1_mismatch_A-G | | | | | | | | | |
| | 26_6-6_internal_loop- | | | | | | | | | |
| | symmetric_AAAGGC-AAAAUG | | | | | | | | | |
| | 40_4-4_bulge-symmetric_GAGU- | | | | | | | | | |
| | CAGA | | | | | | | | | |
| 2586 | −33_4-4_bulge-symmetric_UUCG- | GCCACACAGACCUCCUCAUU | −8 | 28 | 0.182 | 0.92 | 0.929 | 1.015 | 1.623 | 1.583 |
| | ACAU | UGUUGAAAGUCCUCUCAUG | | | | | | | | |
| | −20_4-4_bulge-symmetric_UGGU- | AAUACAUCCACGGCUAAUC | | | | | | | | |
| | UAGU | AUUGGCUUUACUAGUCACU | | | | | | | | |
| | −8_6-6_internal_loop- | GUCGUACAUUGGCCACUCCC | | | | | | | | |
| | symmetric_GAAUUC-CAUUGG | AGU | | | | | | | | |
| | 0_1-1_mismatch_A-C | | | | | | | | | |
| | 16_1-1_mismatch_A-C | | | | | | | | | |
| | 28_6-6_internal_loop- | | | | | | | | | |
| | symmetric_AGGCCA-CAUUUG | | | | | | | | | |
| | 40_4-4_bulge-symmetric_GAGU- | | | | | | | | | |
| | CAGA | | | | | | | | | |
| 2587 | −33_4-4_bulge-symmetric_UUCG- | GCCACACAGACCUCAAGCAG | −8 | 30 | 0.305 | 0.896 | 0.879 | 1.142 | 1.459 | 1.448 |
| | ACAU | CUUUGAAAGUCCUUUCAUG | | | | | | | | |
| | −20_4-4_bulge-symmetric_UGGU- | AAUACCUCCACGGCUAAUCC | | | | | | | | |
| | UAGU | AAGGCUUUACUAGUCACUG | | | | | | | | |
| | −8_6-6_internal_loop- | UCGUACAUUGGCCACUCCCA | | | | | | | | |
| | symmetric_GAAUUC-CCAAGG | GU | | | | | | | | |
| | 0_1-1_mismatch_A-C | | | | | | | | | |
| | 5_1-1_mismatch_U-C | | | | | | | | | |
| | 30_6-6_internal_loop- | | | | | | | | | |
| | symmetric_GCCAAG-AAGCAG | | | | | | | | | |
| | 40_4-4_bulge-symmetric_GAGU- | | | | | | | | | |
| | CAGA | | | | | | | | | |
| 2588 | −33_4-4_bulge-symmetric_UUCG- | GCCACAUGGAAGUCCUUGG | −8 | 38 | 0.174 | 0.919 | 0.939 | 0.615 | 1.187 | 1.061 |
| | ACAU | CCUUUGAAAGUCCUUUCAU | | | | | | | | |
| | −20_4-4_bulge-symmetric_UGGU- | GAAUCGAUCCACGGCUAAU | | | | | | | | |
| | UAGU | CUACGGCUUUACUAGUCAC | | | | | | | | |
| | −8_6-6_internal_loop- | UGUCGUACAUUGGCCACUC | | | | | | | | |
| | symmetric_GAAUUC-CUACGG | CCAGU | | | | | | | | |
| | 0_1-1_mismatch_A-C | | | | | | | | | |
| | 6_2-2_bulge-symmetric_GU-CG | | | | | | | | | |
| | 38_6-6_internal_loop- | | | | | | | | | |
| | symmetric_GGGAGU-UGGAAG | | | | | | | | | |
| 2589 | −33_4-4_bulge-symmetric_UUCG- | GCCACACAGACCUCCUGUUU | −8 | 28 | 0.065 | 0.566 | 0.573 | 0.929 | 1.328 | 1.317 |
| | ACAU | ACUUGAAAGUCCUCUCAUG | | | | | | | | |
| | −20_4-4_bulge-symmetric_UGGU- | AAUACAUCCACGGUAAUUC | | | | | | | | |
| | UAGU | AAGGCUUUACUAGUCACUG | | | | | | | | |
| | −8_6-6_internal_loop- | UCGUACAUUGGCCACUCCCA | | | | | | | | |
| | symmetric_GAAUUC-UCAAGG | GU | | | | | | | | |
| | −3_1-0_bulge-asymmetric_G- | | | | | | | | | |
| | 0_1-1_mismatch_A-C | | | | | | | | | |
| | 16_1-1_mismatch_A-C | | | | | | | | | |
| | 28_6-6_internal_loop- | | | | | | | | | |
| | symmetric_AGGCCA-GUUUAC | | | | | | | | | |
| | 40_4-4_bulge-symmetric_GAGU- | | | | | | | | | |
| | CAGA | | | | | | | | | |
| 2590 | −33_4-4_bulge-symmetric_UUCG- | GCCACAUAGGGAUCCUUGG | −18 | 38 | 0.403 | 0.927 | 0.929 | 0.542 | 0.701 | 0.726 |
| | ACAU | CCUUUGAAAGUCCUUUCAU | | | | | | | | |
| | −18_6-6_internal_loop- | GAAUACAUCCACGGCGAAU | | | | | | | | |
| | symmetric_UGGUGU-UGUUAU | GAAUUCCUUUUGUUAUCAC | | | | | | | | |
| | −4_1-1_mismatch_A-G | UGUCGUACAUUGGCCACUC | | | | | | | | |
| | 0_1-1_mismatch_A-C | CCAGU | | | | | | | | |
| | 38_6-6_internal_loop- | | | | | | | | | |
| | symmetric_GGGAGU-UAGGGA | | | | | | | | | |
| 2591 | −33_4-4_bulge-symmetric_UUCG- | GCCACACAGACCUCAGCCUA | −10 | 30 | 0.33 | 0.93 | 0.916 | 1.196 | 1.435 | 1.472 |
| | ACAU | CUUUGAAAGUCCUUUCAUC | | | | | | | | |
| | −20_4-4_bulge-symmetric_UGGU- | AAUACCACCACGGCUAAUG | | | | | | | | |
| | UAGU | ACAGUACUUACUAGUCACU | | | | | | | | |
| | −10_6-6_internal_loop- | GUCGUACAUUGGCCACUCCC | | | | | | | | |
| | symmetric_AGGAAU-CAGUAC | AGU | | | | | | | | |
| | 0_1-1_mismatch_A-C | | | | | | | | | |
| | 4_2-2_bulge-symmetric_AU-CA | | | | | | | | | |
| | 11_1-1_mismatch_C-C | | | | | | | | | |
| | 30_6-6_internal_loop- | | | | | | | | | |
| | symmetric_GCCAAG-AGCCUA | | | | | | | | | |
| | 40_4-4_bulge-symmetric_GAGU- | | | | | | | | | |
| | CAGA | | | | | | | | | |
| 2592 | −33_4-4_bulge-symmetric_UUCG- | GCCACACAGACCUCCUUGUA | −20 | 26 | 0.023 | 0.927 | 0.923 | 0.91 | 1.696 | 1.697 |
| | ACAU | GGGGGAAAGUCCUUGAAUG | | | | | | | | |
| | −20_6-6_internal_loop- | AAUACAUCCACGGCUAAUG | | | | | | | | |
| | symmetric_UGUGGU-UGUGUU | AAUUCCUUUACUGUGUUCU | | | | | | | | |
| | 0_1-1_mismatch_A-C | GUCGUACAUUGGCCACUCCC | | | | | | | | |
| | 14_2-2_bulge-symmetric_GA-GA | AGU | | | | | | | | |
| | 26_6-6_internal_loop- | | | | | | | | | |
| | symmetric_AAAGGC-UAGGGG | | | | | | | | | |
| | 40_4-4_bulge-symmetric_GAGU- | | | | | | | | | |
| | CAGA | | | | | | | | | |
| 2593 | −33_4-4_bulge-symmetric_UUCG- | GCCACACAGACCUCCUUGUA | −10 | 26 | 0.025 | 0.553 | 0.594 | 0.933 | 1.236 | 1.187 |
| | ACAU | UGGGGAAAGUCCCUUGAUG | | | | | | | | |
| | −20_4-4_bulge-symmetric_UGGU- | ACACAUCCACGGCUAAUGA | | | | | | | | |
| | UAGU | CGCGGAUUACUAGUCACUG | | | | | | | | |
| | −10_6-6_internal_loop- | UCGUACAUUGGCCACUCCCA | | | | | | | | |
| | symmetric_AGGAAU-CGCGGA | GU | | | | | | | | |
| | 0_1-1_mismatch_A-C | | | | | | | | | |
| | 8_2-1_bulge-asymmetric_AU-C | | | | | | | | | |
| | 14_1-1_mismatch_G-G | | | | | | | | | |
| | 17_1-1_mismatch_A-C | | | | | | | | | |
| | 26_6-6_internal_loop- | | | | | | | | | |
| | symmetric_AAAGGC-UAUGGG | | | | | | | | | |
| | 40_4-4_bulge-symmetric_GAGU- | | | | | | | | | |
| | CAGA | | | | | | | | | |
| 2594 | −33_4-4_bulge-symmetric_UUCG- | GCCACACAGACCUCCUACUG | −6 | 28 | 0.034 | 0.752 | 0.783 | 0.939 | 1.404 | 1.366 |
| | ACAU | ACUUGAAAGUCAGUUUCAU | | | | | | | | |
| | −20_4-4_bulge-symmetric_UGGU- | GAAUACAUCCACGGCUAUC | | | | | | | | |
| | UAGU | UAGCUCCUUUACUAGUCAC | | | | | | | | |
| | −6_6-6_internal_loop- | UGUCGUACAUUGGCCACUC | | | | | | | | |
| | symmetric_AUUCAU-UCUAGC | CCAGU | | | | | | | | |
| | 0_1-1_mismatch_A-C | | | | | | | | | |
| | 18_1-2_bulge-asymmetric_G-AG | | | | | | | | | |
| | 28_6-6_internal_loop- | | | | | | | | | |
| | symmetric_AGGCCA-ACUGAC | | | | | | | | | |
| | 40_4-4_bulge-symmetric_GAGU- | | | | | | | | | |
| | CAGA | | | | | | | | | |
| 2595 | −33_4-4_bulge-symmetric_UUCG- | GCCACACAGACCUCCUUGUU | −8 | 26 | 0.047 | 0.76 | 0.742 | 0.949 | 1.587 | 1.526 |
| | ACAU | GAUGGAAAGUCCUUUCAUG | | | | | | | | |
| | −20_4-4_bulge-symmetric_UGGU- | AAUACCCCACGGCUAAUAC | | | | | | | | |
| | UAGU | AGGGCUUUACUAGUCACUG | | | | | | | | |
| | −8_6-6_internal_loop- | UCGUACAUUGGCCACUCCCA | | | | | | | | |
| | symmetric_GAAUUC-ACAGGG | GU | | | | | | | | |
| | 0_1-1_mismatch_A-C | | | | | | | | | |
| | 4_2-1_bulge-asymmetric_AU-C | | | | | | | | | |
| | 26_6-6_internal_loop- | | | | | | | | | |
| | symmetric_AAAGGC-UUGAUG | | | | | | | | | |
| | 40_4-4_bulge-symmetric_GAGU- | | | | | | | | | |
| | CAGA | | | | | | | | | |
| 2596 | −33_4-4_bulge-symmetric_UUCG- | GCCACACAGACCUCCUUGUU | −18 | 26 | 0.296 | 0.959 | 0.942 | 1.135 | 1.726 | 1.664 |
| | ACAU | GAAGGAAAGUCCUUUCAUG | | | | | | | | |
| | −18_6-6_internal_loop- | AAUACUUCCACGGCUAAUG | | | | | | | | |
| | symmetric_UGGUGU-UUUGUU | AAUUCCUUUUUUGUUCACU | | | | | | | | |
| | 0_1-1_mismatch_A-C | GUCGUACAUUGGCCACUCCC | | | | | | | | |
| | 5_1-1_mismatch_U-U | AGU | | | | | | | | |
| | 26_6-6_internal_loop- | | | | | | | | | |
| | symmetric_AAAGGC-UUGAAG | | | | | | | | | |
| | 40_4-4_bulge-symmetric_GAGU- | | | | | | | | | |
| | CAGA | | | | | | | | | |
| 2597 | −33_4-4_bulge-symmetric_UUCG- | GCCACACAGACCUCCUUGUA | −20 | 26 | 0.052 | 0.862 | 0.833 | 0.887 | 1.604 | 1.588 |
| | ACAU | GGACGAAAGUACUUUCAUG | | | | | | | | |
| | −20_6-6_internal_loop- | AAUACAUCCAUAGAUGCUG | | | | | | | | |
| | symmetric_UGUGGU-UAGAAU | AAUUCCUUUACUAGAAUCU | | | | | | | | |
| | −6_1-1_mismatch_U-C | GUCGUACAUUGGCCACUCCC | | | | | | | | |
| | −5_1-1_wobble_U-G | AGU | | | | | | | | |
| | −3_1-1_mismatch_G-A | | | | | | | | | |
| | −1_1-1_mismatch_C-A | | | | | | | | | |
| | 19_1-1_mismatch_G-A | | | | | | | | | |
| | 26_6-6_internal_loop- | | | | | | | | | |
| | symmetric_AAAGGC-UAGGAC | | | | | | | | | |
| | 40_4-4_bulge-symmetric_GAGU- | | | | | | | | | |
| | CAGA | | | | | | | | | |
| 2598 | −33_4-4_bulge-symmetric_UUCG- | GCCACAUAGGGGUCCUUGG | −6 | 38 | 0.116 | 0.92 | 0.929 | 0.604 | 0.796 | 0.786 |
| | ACAU | CCUUUGAAAGUCUUUUCAU | | | | | | | | |
| | −20_4-4_bulge-symmetric_UGGU- | GAAUUCAUCCACGGCUACG | | | | | | | | |
| | UAGU | CUAGUCCUUUACUAGUCAC | | | | | | | | |
| | −6_6-6_internal_loop- | UGUCGUACAUUGGCCACUC | | | | | | | | |
| | symmetric_AUUCAU-CGCUAG | CCAGU | | | | | | | | |
| | 0_1-1_mismatch_A-C | | | | | | | | | |
| | 7_1-1_mismatch_U-U | | | | | | | | | |
| | 18_1-1_wobble_G-U | | | | | | | | | |
| | 38_6-6_internal_loop- | | | | | | | | | |
| | symmetric_GGGAGU-UAGGGG | | | | | | | | | |
| 2599 | −33_4-4_bulge-symmetric_UUCG- | GCCACACAGACCAGGUAUG | −6 | 32 | 0.065 | 0.584 | 0.629 | 0.971 | 1.28 | 1.326 |
| | ACAU | CCUUUGAAAGUCAAUUCAU | | | | | | | | |
| | −20_4-4_bulge-symmetric_UGGU- | GAAUACUUCCACGACUAUA | | | | | | | | |
| | UAGU | AAACUCCUUUACUAGUCAC | | | | | | | | |
| | −6_6-6_internal_loop- | UGUCGUACAUUGGCCACUC | | | | | | | | |
| | symmetric_AUUCAU-UAAAAC | CCAGU | | | | | | | | |
| | −2_1-1_mismatch_C-A | | | | | | | | | |
| | 0_1-1_mismatch_A-C | | | | | | | | | |
| | 5_1-1_mismatch_U-U | | | | | | | | | |
| | 17_2-2_bulge-symmetric_AG-AA | | | | | | | | | |
| | 32_6-6_internal_loop- | | | | | | | | | |
| | symmetric_CAAGGA-AGGUAU | | | | | | | | | |
| | 40_4-4_bulge-symmetric_GAGU- | | | | | | | | | |
| | CAGA | | | | | | | | | |
| 2600 | −33_4-4_bulge-symmetric_UUCG- | GCCACACAGACCUCCUUGAU | −6 | 26 | 0.379 | 0.913 | 0.908 | 1.219 | 1.72 | 1.652 |
| | ACAU | AGGCGAAAGUCCUUUCAUG | | | | | | | | |
| | −20_4-4_bulge-symmetric_UGGU- | AAUAACUCCACGGCUAUCA | | | | | | | | |
| | UAGU | UACUCCUUUACUAGUCACU | | | | | | | | |
| | −6_6-6_internal_loop- | GUCGUACAUUGGCCACUCCC | | | | | | | | |
| | symmetric_AUUCAU-UCAUAC | AGU | | | | | | | | |
| | 0_1-1_mismatch_A-C | | | | | | | | | |
| | 5_2-2_bulge-symmetric_UG-AC | | | | | | | | | |
| | 26_6-6_internal_loop- | | | | | | | | | |
| | symmetric_AAAGGC-AUAGGC | | | | | | | | | |
| | 40_4-4_bulge-symmetric_GAGU- | | | | | | | | | |
| | CAGA | | | | | | | | | |
| 2601 | −33_4-4_bulge-symmetric_UUCG- | GCCACACAGACCUCCUUGUA | −18 | 26 | 0.034 | 0.886 | 0.877 | 0.916 | 1.639 | 1.631 |
| | ACAU | UGAGGAAAGUCCUUUCCAG | | | | | | | | |
| | −18_6-6_internal_loop- | AAUACAUCCACGGCUAAUG | | | | | | | | |
| | symmetric_UGGUGU-UAGUGU | AAUUCCUUUUAGUGUCACU | | | | | | | | |
| | 0_1-1_mismatch_A-C | GUCGUACAUUGGCCACUCCC | | | | | | | | |
| | 12_2-2_bulge-symmetric_AU-CA | AGU | | | | | | | | |
| | 26_6-6_internal_loop- | | | | | | | | | |
| | symmetric_AAAGGC-UAUGAG | | | | | | | | | |
| | 40_4-4_bulge-symmetric_GAGU- | | | | | | | | | |
| | CAGA | | | | | | | | | |
| 2602 | −33_4-4_bulge-symmetric_UUCG- | GCCACACAGACCUCCUGACU | −10 | 28 | 0.122 | 0.771 | 0.771 | 0.838 | 0.915 | 0.925 |
| | ACAU | AAUUGAAAGUCCUUUCAUG | | | | | | | | |
| | −20_4-4_bulge-symmetric_UGGU- | AAUACACGCACGGCUCGUG | | | | | | | | |
| | UAGU | ACACGGAUUACUAGUCACU | | | | | | | | |
| | −10_6-6_internal_loop- | GUCGUACAUUGGCCACUCCC | | | | | | | | |
| | symmetric_AGGAAU-CACGGA | AGU | | | | | | | | |
| | −6_1-1_wobble_U-G | | | | | | | | | |
| | −5_1-1_mismatch_U-C | | | | | | | | | |
| | 0_1-1_mismatch_A-C | | | | | | | | | |
| | 3_2-2_bulge-symmetric_GA-CG | | | | | | | | | |
| | 28_6-6_internal_loop- | | | | | | | | | |
| | symmetric_AGGCCA-GACUAA | | | | | | | | | |
| | 40_4-4_bulge-symmetric_GAGU- | | | | | | | | | |
| | CAGA | | | | | | | | | |
| 2603 | −33_4-4_bulge-symmetric_UUCG- | GCCACACAGACCUCCUGAUA | −8 | 28 | 0.158 | 0.75 | 0.756 | 1.007 | 1.405 | 1.431 |
| | ACAU | GAUUGAAAGUCCUUUCAUG | | | | | | | | |
| | −20_4-4_bulge-symmetric_UGGU- | CCUACAUCCACGGCUAAUA | | | | | | | | |
| | UAGU | UGCGGCUUUACUAGUCACU | | | | | | | | |
| | −8_6-6_internal_loop- | GUCGUACAUUGGCCACUCCC | | | | | | | | |
| | symmetric_GAAUUC-AUGCGG | AGU | | | | | | | | |
| | 0_1-1_mismatch_A-C | | | | | | | | | |
| | 9_2-2_bulge-symmetric_UU-CC | | | | | | | | | |
| | 28_6-6_internal_loop- | | | | | | | | | |
| | symmetric_AGGCCA-GAUAGA | | | | | | | | | |
| | 40_4-4_bulge-symmetric_GAGU- | | | | | | | | | |
| | CAGA | | | | | | | | | |
| 2604 | −33_4-4_bulge-symmetric_UUCG- | GCCACACAGACCGGGUACGC | −18 | 32 | 0.03 | 0.831 | 0.764 | 0.93 | 1.672 | 1.538 |
| | ACAU | CUUUGAAAGUAUCAUGAAU | | | | | | | | |
| | −18_6-6_internal_loop- | ACAUCCACGGCUAACGAAU | | | | | | | | |
| | symmetric_UGGUGU-UGUUUU | UCCUUUUGUUUUCACUGUC | | | | | | | | |
| | −7_1-1_mismatch_A-C | GUACAUUGGCCACUCCCAG | | | | | | | | |
| | 0_1-1_mismatch_A-C | U | | | | | | | | |
| | 16_4-1_bulge-asymmetric_AAGG-A | | | | | | | | | |
| | 32_6-6_internal_loop- | | | | | | | | | |
| | symmetric_CAAGGA-GGGUAC | | | | | | | | | |
| | 40_4-4_bulge-symmetric_GAGU- | | | | | | | | | |
| | CAGA | | | | | | | | | |
| 2605 | −33_4-4_bulge-symmetric_UUCG- | GCCACACAGACCUCCUAACA | −8 | 28 | 0.415 | 0.957 | 0.956 | 1.211 | 1.729 | 1.716 |
| | ACAU | GGUUGAAAGUCCUUUCAUG | | | | | | | | |
| | −20_4-4_bulge-symmetric_UGGU- | AAUACAUCCACGGCUAAUU | | | | | | | | |
| | UAGU | UGCUACUUUACUAGUCACU | | | | | | | | |
| | −8_6-6_internal_loop- | GUCGUACAUUGGCCACUCCC | | | | | | | | |
| | symmetric_GAAUUC-UUGCUA | AGU | | | | | | | | |
| | 0_1-1_mismatch_A-C | | | | | | | | | |
| | 28_6-6_internal_loop- | | | | | | | | | |
| | symmetric_AGGCCA-AACAGG | | | | | | | | | |
| | 40_4-4_bulge-symmetric_GAGU- | | | | | | | | | |
| | CAGA | | | | | | | | | |
| 2606 | −33_4-4_bulge-symmetric_UUCG- | GCCACACAGACCUCCUAAAA | −18 | 28 | 0.046 | 0.931 | 0.909 | 0.934 | 1.701 | 1.638 |
| | ACAU | UGUUGAAAGUGCUUUCAGG | | | | | | | | |
| | −18_6-6_internal_loop- | AAUACAUCCACGGCUAAUG | | | | | | | | |
| | symmetric_UGGUGU-UUGUUU | AAUUCCUUUUUGUUUCACU | | | | | | | | |
| | 0_1-1_mismatch_A-C | GUCGUACAUUGGCCACUCCC | | | | | | | | |
| | 12_1-1_mismatch_A-G | AGU | | | | | | | | |
| | 19_1-1_mismatch_G-G | | | | | | | | | |
| | 28_6-6_internal_loop- | | | | | | | | | |
| | symmetric_AGGCCA-AAAAUG | | | | | | | | | |
| | 40_4-4_bulge-symmetric_GAGU- | | | | | | | | | |
| | CAGA | | | | | | | | | |
| 2607 | −33_4-4_bulge-symmetric_UUCG- | GCCACACAGACCAUUAGCGC | −6 | 32 | 0.147 | 0.919 | 0.917 | 0.89 | 1.006 | 1.042 |
| | ACAU | CUUUGAAAGUCCUUUGAUG | | | | | | | | |
| | −20_4-4_bulge-symmetric_UGGU- | CAUACAUCCACGGCUAUUU | | | | | | | | |
| | UAGU | AGGUCCUUUACUAGUCACU | | | | | | | | |
| | −6_6-6_internal_loop- | GUCGUACAUUGGCCACUCCC | | | | | | | | |
| | symmetric_AUUCAU-UUUAGG | AGU | | | | | | | | |
| | 0_1-1_mismatch_A-C | | | | | | | | | |
| | 10_1-1_mismatch_U-C | | | | | | | | | |
| | 14_1-1_mismatch_G-G | | | | | | | | | |
| | 32_6-6_internal_loop- | | | | | | | | | |
| | symmetric_CAAGGA-AUUAGC | | | | | | | | | |
| | 40_4-4_bulge-symmetric_GAGU- | | | | | | | | | |
| | CAGA | | | | | | | | | |
| 2608 | −33_4-4_bulge-symmetric_UUCG- | GCCACACAGACCUCCUGAUA | −8 | 28 | 0.09 | 0.849 | 0.865 | 0.978 | 1.324 | 1.382 |
| | ACAU | ACUUGAAAGUCCUUUGAUG | | | | | | | | |
| | −20_4-4_bulge-symmetric_UGGU- | CAUACAUCCACGGCUAAUC | | | | | | | | |
| | UAGU | UGGGGCUUUACUAGUCACU | | | | | | | | |
| | −8_6-6_internal_loop- | GUCGUACAUUGGCCACUCCC | | | | | | | | |
| | symmetric_GAAUUC-CUGGGG | AGU | | | | | | | | |
| | 0_1-1_mismatch_A-C | | | | | | | | | |
| | 10_1-1_mismatch_U-C | | | | | | | | | |
| | 14_1-1_mismatch_G-G | | | | | | | | | |
| | 28_6-6_internal_loop- | | | | | | | | | |
| | symmetric_AGGCCA-GAUAAC | | | | | | | | | |
| | 40_4-4_bulge-symmetric_GAGU- | | | | | | | | | |
| | CAGA | | | | | | | | | |
| 2609 | −33_4-4_bulge-symmetric_UUCG- | GCCACAUACAAGUCCUUGG | −8 | 38 | 0.238 | 0.937 | 0.933 | 0.614 | 0.737 | 0.791 |
| | ACAU | CCUUUGAAAGUCCUUUGAU | | | | | | | | |
| | −20_4-4_bulge-symmetric_UGGU- | GCAUACAUCCACGGCUAAU | | | | | | | | |
| | UAGU | UUAGUACUUUACUAGUCAC | | | | | | | | |
| | −8_6-6_internal_loop- | UGUCGUACAUUGGCCACUC | | | | | | | | |
| | symmetric_GAAUUC-UUAGUA | CCAGU | | | | | | | | |
| | 0_1-1_mismatch_A-C | | | | | | | | | |
| | 10_1-1_mismatch_U-C | | | | | | | | | |
| | 14_1-1_mismatch_G-G | | | | | | | | | |
| | 38_6-6_internal_loop- | | | | | | | | | |
| | symmetric_GGGAGU-UACAAG | | | | | | | | | |
| 2610 | −8_6-6_internal_loop- | GCCACAACUCCCUCGAACGA | −8 | 30 | 0.359 | 0.834 | 0.744 | 1.075 | 1.236 | 1.183 |
| | symmetric_GAAUUC-UAUAAG | CUUUGAAAGUCCUUUCAUG | | | | | | | | |
| | 0_1-1_mismatch_A-C | AAUAGAUCCACGGCUAAUU | | | | | | | | |
| | 6_1-1_mismatch_G-G | AUAAGCUUUACACCACACU | | | | | | | | |
| | 30_6-6_internal_loop- | GUCGUCGAAUGGCCACUCCC | | | | | | | | |
| | symmetric_GCCAAG-GAACGA | AGU | | | | | | | | |
| 2611 | −33_4-4_bulge-symmetric_UUCG- | GCCACAACUCCCUCGAACGA | −8 | 30 | 0.341 | 0.782 | 0.743 | 1.075 | 1.206 | 1.326 |
| | ACAU | CUUUGAAAGUCCUUUCAUG | | | | | | | | |
| | −20_4-4_bulge-symmetric_UGGU- | AAUAGAUCCACGGCUAAUU | | | | | | | | |
| | UAGU | AUAAGCUUUACUAGUCACU | | | | | | | | |
| | −8_6-6_internal_loop- | GUCGUACAUUGGCCACUCCC | | | | | | | | |
| | symmetric_GAAUUC-UAUAAG | AGU | | | | | | | | |
| | 0_1-1_mismatch_A-C | | | | | | | | | |
| | 6_1-1_mismatch_G-G | | | | | | | | | |
| | 30_6-6_internal_loop- | | | | | | | | | |
| | symmetric_GCCAAG-GAACGA | | | | | | | | | |
| 2612 | −6_6-6_internal_loop- | GCCACAACUCCCUCCUUGGC | −6 | 24 | 0.288 | 0.778 | 0.713 | 0.938 | 1.218 | 1.198 |
| | symmetric_AUUCAU-UGCCUG | AAGUCCAAGUCCUUUCAUG | | | | | | | | |
| | 0_1-1_mismatch_A-C | AAUAGAUCCACGGCUAUGC | | | | | | | | |
| | 6_1-1_mismatch_G-G | CUGUCCUUUACACCACACUG | | | | | | | | |
| | 24_6-6_internal_loop- | UCGUCGAAUGGCCACUCCCA | | | | | | | | |
| | symmetric_UCAAAG-AAGUCC | GU | | | | | | | | |
| 2613 | −33_4-4_bulge-symmetric_UUCG- | GCCACACAGACCUCCUUGGC | −6 | 24 | 0.27 | 0.917 | 0.911 | 1.136 | 1.65 | 1.595 |
| | ACAU | AAGUCCAAGUCCUUUCAUG | | | | | | | | |
| | −20_4-4_bulge-symmetric_UGGU- | AAUAGAUCCACGGCUAUGC | | | | | | | | |
| | UAGU | CUGUCCUUUACUAGUCACU | | | | | | | | |
| | −6_6-6_internal_loop- | GUCGUACAUUGGCCACUCCC | | | | | | | | |
| | symmetric_AUUCAU-UGCCUG | AGU | | | | | | | | |
| | 0_1-1_mismatch_A-C | | | | | | | | | |
| | 6_1-1_mismatch_G-G | | | | | | | | | |
| | 24_6-6_internal_loop- | | | | | | | | | |
| | symmetric_UCAAAG-AAGUCC | | | | | | | | | |
| | 40_4-4_bulge-symmetric_GAGU- | | | | | | | | | |
| | CAGA | | | | | | | | | |
| 2614 | −6_6-6_internal_loop- | GCCACACAGACCUCCUUGGC | −6 | 24 | 0.475 | 0.881 | 0.864 | 1.177 | 1.57 | 1.424 |
| | symmetric_AUUCAU-UGCCUG | AAGUCCAAGUCCUUUCAUG | | | | | | | | |
| | 0_1-1_mismatch_A-C | AAUAGAUCCACGGCUAUGC | | | | | | | | |
| | 6_1-1_mismatch_G-G | CUGUCCUUUACACCACACUG | | | | | | | | |
| | 24_6-6_internal_loop- | UCGUCGAAUGGCCACUCCCA | | | | | | | | |
| | symmetric_UCAAAG-AAGUCC | GU | | | | | | | | |
| | 40_4-4_bulge-symmetric_GAGU- | | | | | | | | | |
| | CAGA | | | | | | | | | |
| 2615 | −33_4-4_bulge-symmetric_UUCG- | GCCACAACUCCCUCCUUGGC | −6 | 24 | 0.302 | 0.783 | 0.806 | 0.955 | 1.235 | 1.28 |
| | ACAU | AAGUCCAAGUCCUUUCAUG | | | | | | | | |
| | −20_4-4_bulge-symmetric_UGGU- | AAUAGAUCCACGGCUAUGC | | | | | | | | |
| | UAGU | CUGUCCUUUACUAGUCACU | | | | | | | | |
| | −6_6-6_internal_loop- | GUCGUACAUUGGCCACUCCC | | | | | | | | |
| | symmetric_AUUCAU-UGCCUG | AGU | | | | | | | | |
| | 0_1-1_mismatch_A-C | | | | | | | | | |
| | 6_1-1_mismatch_G-G | | | | | | | | | |
| | 24_6-6_internal_loop- | | | | | | | | | |
| | symmetric_UCAAAG-AAGUCC | | | | | | | | | |
| 2616 | −12_6-6_internal_loop- | GCCACAACUCCCUCCUUGAA | −12 | 26 | 0.304 | 0.773 | 0.734 | 1.017 | 1.3 | 1.195 |
| | symmetric_AAAGGA-GGUUUG | AGCAGAAAGUCCUUUCGUG | | | | | | | | |
| | −4_3-2_bulge-asymmetric_UUA-AC | AAUACAUCCACGGCACUGA | | | | | | | | |
| | 0_1-1_mismatch_A-C | AUGGUUUGACACCACACUG | | | | | | | | |
| | 13_1-1_wobble_U-G | UCGUCGAAUGGCCACUCCCA | | | | | | | | |
| | 26_6-6_internal_loop- | GU | | | | | | | | |
| | symmetric_AAAGGC-AAAGCA | | | | | | | | | |
| 2617 | −12_6-6_internal_loop- | GCCACACAGACCUCCUUGAA | −12 | 26 | 0.639 | 0.922 | 0.873 | 1.391 | 1.641 | 1.649 |
| | symmetric_AAAGGA-GGUUUG | AGCAGAAAGUCCUUUCGUG | | | | | | | | |
| | −4_3-2_bulge-asymmetric_UUA-AC | AAUACAUCCACGGCACUGA | | | | | | | | |
| | 0_1-1_mismatch_A-C | AUGGUUUGACACCACACUG | | | | | | | | |
| | 13_1-1_wobble_U-G | UCGUCGAAUGGCCACUCCCA | | | | | | | | |
| | 26_6-6_internal_loop- | GU | | | | | | | | |
| | symmetric_AAAGGC-AAAGCA | | | | | | | | | |
| | 40_4-4_bulge-symmetric_GAGU- | | | | | | | | | |
| | CAGA | | | | | | | | | |
| 2618 | −18_6-6_internal_loop- | GCCACAACUCCCUCGCGCAA | −18 | 30 | 0.368 | 0.806 | 0.803 | 1.136 | 1.286 | 1.315 |
| | symmetric_UGGUGU-UGGAGU | CUUUGAAAGUCCUUUCAUG | | | | | | | | |
| | −6_3-3_bulge-symmetric_CAU-CAU | CAUAGAUCCACGGCUACAU | | | | | | | | |
| | 0_1-1_mismatch_A-C | AAUUCCUUUUGGAGUCACU | | | | | | | | |
| | 6_1-1_mismatch_G-G | GUCGUCGAAUGGCCACUCCC | | | | | | | | |
| | 10_1-1_mismatch_U-C | AGU | | | | | | | | |
| | 30_6-6_internal_loop- | | | | | | | | | |
| | symmetric_GCCAAG-GCGCAA | | | | | | | | | |
| 2619 | −18_6-6_internal_loop- | GCCACACAGACCUCGCGCAA | −18 | 30 | 0.459 | 0.895 | 0.872 | 1.247 | 1.496 | 1.552 |
| | symmetric_UGGUGU-UGGAGU | CUUUGAAAGUCCUUUCAUG | | | | | | | | |
| | −6_3-3_bulge-symmetric_CAU-CAU | CAUAGAUCCACGGCUACAU | | | | | | | | |
| | 0_1-1_mismatch_A-C | AAUUCCUUUUGGAGUCACU | | | | | | | | |
| | 6_1-1_mismatch_G-G | GUCGUCGAAUGGCCACUCCC | | | | | | | | |
| | 10_1-1_mismatch_U-C | AGU | | | | | | | | |
| | 30_6-6_internal_loop- | | | | | | | | | |
| | symmetric_GCCAAG-GCGCAA | | | | | | | | | |
| | 40_4-4_bulge-symmetric_GAGU- | | | | | | | | | |
| | CAGA | | | | | | | | | |
| 2620 | −33_4-4_bulge-symmetric_UUCG- | GCCACAACUCCCUCGCGCAA | −18 | 30 | 0.29 | 0.816 | 0.843 | 1.037 | 1.368 | 1.36 |
| | ACAU | CUUUGAAAGUCCUUUCAUG | | | | | | | | |
| | −18_6-6_internal_loop- | CAUAGAUCCACGGCUACAU | | | | | | | | |
| | symmetric_UGGUGU-UGGAGU | AAUUCCUUUUGGAGUCACU | | | | | | | | |
| | −6_3-3_bulge-symmetric_CAU-CAU | GUCGUACAUUGGCCACUCCC | | | | | | | | |
| | 0_1-1_mismatch_A-C | AGU | | | | | | | | |
| | 6_1-1_mismatch_G-G | | | | | | | | | |
| | 10_1-1_mismatch_U-C | | | | | | | | | |
| | 30_6-6_internal_loop- | | | | | | | | | |
| | symmetric_GCCAAG-GCGCAA | | | | | | | | | |
| 2621 | −10_6-6_internal_loop- | GCCACAACUCCCUCAGCCUA | −10 | 30 | 0.395 | 0.757 | 0.676 | 1.043 | 1.165 | 1.189 |
| | symmetric_AGGAAU-CAGUAC | CUUUGAAAGUCCUUUCAUC | | | | | | | | |
| | 0_1-1_mismatch_A-C | AAUACCACCACGGCUAAUG | | | | | | | | |
| | 4_2-2_bulge-symmetric_AU-CA | ACAGUACUUACACCACACU | | | | | | | | |
| | 11_1-1_mismatch_C-C | GUCGUCGAAUGGCCACUCCC | | | | | | | | |
| | 30_6-6_internal_loop- | AGU | | | | | | | | |
| | symmetric_GCCAAG-AGCCUA | | | | | | | | | |
| 2622 | −10_6-6_internal_loop- | GCCACACAGACCUCAGCCUA | −10 | 30 | 0.712 | 0.927 | 0.884 | 1.405 | 1.283 | 1.438 |
| | symmetric_AGGAAU-CAGUAC | CUUUGAAAGUCCUUUCAUC | | | | | | | | |
| | 0_1-1_mismatch_A-C | AAUACCACCACGGCUAAUG | | | | | | | | |
| | 4_2-2_bulge-symmetric_AU-CA | ACAGUACUUACACCACACU | | | | | | | | |
| | 11_1-1_mismatch_C-C | GUCGUCGAAUGGCCACUCCC | | | | | | | | |
| | 30_6-6_internal_loop- | AGU | | | | | | | | |
| | symmetric_GCCAAG-AGCCUA | | | | | | | | | |
| | 40_4-4_bulge-symmetric_GAGU- | | | | | | | | | |
| | CAGA | | | | | | | | | |
| 2623 | −33_4-4_bulge-symmetric_UUCG- | GCCACAACUCCCUCAGCCUA | −10 | 30 | 0.302 | 0.792 | 0.804 | 1.099 | 1.208 | 1.317 |
| | ACAU | CUUUGAAAGUCCUUUCAUC | | | | | | | | |
| | −20_4-4_bulge-symmetric_UGGU- | AAUACCACCACGGCUAAUG | | | | | | | | |
| | UAGU | ACAGUACUUACUAGUCACU | | | | | | | | |
| | −10_6-6_internal_loop- | GUCGUACAUUGGCCACUCCC | | | | | | | | |
| | symmetric_AGGAAU-CAGUAC | AGU | | | | | | | | |
| | 0_1-1_mismatch_A-C | | | | | | | | | |
| | 4_2-2_bulge-symmetric_AU-CA | | | | | | | | | |
| | 11_1-1_mismatch_C-C | | | | | | | | | |
| | 30_6-6_internal_loop- | | | | | | | | | |
| | symmetric_GCCAAG-AGCCUA | | | | | | | | | |
| 2624 | −14_6-6_internal_loop- | GCCACAACUCCCUCGGACAA | −14 | 30 | 0.465 | 0.751 | 0.744 | 1.127 | 1.166 | 1.25 |
| | symmetric_GUAAAG-GAACCG | CUUUGAAAGUCCUUUCAUG | | | | | | | | |
| | −5_4-4_bulge-symmetric_CAUU- | AAUACAACCACGGCUCAAC | | | | | | | | |
| | CAAC | AAUUCGAACCGACCACACU | | | | | | | | |
| | 0_1-1_mismatch_A-C | GUCGUCGAAUGGCCACUCCC | | | | | | | | |
| | 4_1-1_mismatch_A-A | AGU | | | | | | | | |
| | 30_6-6_internal_loop- | | | | | | | | | |
| | symmetric_GCCAAG-GGACAA | | | | | | | | | |
| 2625 | −14_6-6_internal_loop- | GCCACACAGACCUCGGACAA | −14 | 30 | 0.613 | 0.78 | 0.769 | 1.353 | 1.317 | 1.381 |
| | symmetric_GUAAAG-GAACCG | CUUUGAAAGUCCUUUCAUG | | | | | | | | |
| | −5_4-4_bulge-symmetric_CAUU- | AAUACAACCACGGCUCAAC | | | | | | | | |
| | CAAC | AAUUCGAACCGACCACACU | | | | | | | | |
| | 0_1-1_mismatch_A-C | GUCGUCGAAUGGCCACUCCC | | | | | | | | |
| | 4_1-1_mismatch_A-A | AGU | | | | | | | | |
| | 30_6-6_internal_loop- | | | | | | | | | |
| | symmetric_GCCAAG-GGACAA | | | | | | | | | |
| | 40_4-4_bulge-symmetric_GAGU- | | | | | | | | | |
| | CAGA | | | | | | | | | |
| 2626 | −14_6-6_internal_loop- | GCCACAACUCCCUCCUUGAU | −14 | 26 | 0.268 | 0.749 | 0.766 | 0.947 | 1.183 | 1.222 |
| | symmetric_GUAAAG-GAUCCA | GGCGGAAAGUCCUUUCAUG | | | | | | | | |
| | −7_1-1_mismatch_A-A | AAUACAUCCACGGCUAAAG | | | | | | | | |
| | 0_1-1_mismatch_A-C | AAUUCGAUCCAACCACACU | | | | | | | | |
| | 26_6-6_internal_loop- | GUCGUCGAAUGGCCACUCCC | | | | | | | | |
| | symmetric_AAAGGC-AUGGCG | AGU | | | | | | | | |
| 2627 | −14_6-6_internal_loop- | GCCACACAGACCUCCUUGAU | −14 | 26 | 0.398 | 0.895 | 0.871 | 1.122 | 1.534 | 1.463 |
| | symmetric_GUAAAG-GAUCCA | GGCGGAAAGUCCUUUCAUG | | | | | | | | |
| | −7_1-1_mismatch_A-A | AAUACAUCCACGGCUAAAG | | | | | | | | |
| | 0_1-1_mismatch_A-C | AAUUCGAUCCAACCACACU | | | | | | | | |
| | 26_6-6_internal_loop- | GUCGUCGAAUGGCCACUCCC | | | | | | | | |
| | symmetric_AAAGGC-AUGGCG | AGU | | | | | | | | |
| | 40_4-4_bulge-symmetric_GAGU- | | | | | | | | | |
| | CAGA | | | | | | | | | |
| 2628 | −6_6-6_internal_loop- | GCCACAACUCCCUCGACUAA | −6 | 30 | 0.331 | 0.817 | 0.824 | 1.013 | 1.334 | 1.325 |
| | symmetric_AUUCAU-CUAGUG | CUUUGAAAGUCCUUUCAUG | | | | | | | | |
| | 0_1-1_mismatch_A-C | AAUAGCUCCACGGCUACUA | | | | | | | | |
| | 5_2-2_bulge-symmetric_UG-GC | GUGUCCUUUACACCACACU | | | | | | | | |
| | 30_6-6_internal_loop- | GUCGUCGAAUGGCCACUCCC | | | | | | | | |
| | symmetric_GCCAAG-GACUAA | AGU | | | | | | | | |
| 2629 | −6_6-6_internal_loop- | GCCACACAGACCUCGACUAA | −6 | 30 | 0.633 | 0.919 | 0.917 | 1.365 | 1.65 | 1.631 |
| | symmetric_AUUCAU-CUAGUG | CUUUGAAAGUCCUUUCAUG | | | | | | | | |
| | 0_1-1_mismatch_A-C | AAUAGCUCCACGGCUACUA | | | | | | | | |
| | 5_2-2_bulge-symmetric_UG-GC | GUGUCCUUUACACCACACU | | | | | | | | |
| | 30_6-6_internal_loop- | GUCGUCGAAUGGCCACUCCC | | | | | | | | |
| | symmetric_GCCAAG-GACUAA | AGU | | | | | | | | |
| | 40_4-4_bulge-symmetric_GAGU- | | | | | | | | | |
| | CAGA | | | | | | | | | |
| 2630 | −33_4-4_bulge-symmetric_UUCG- | GCCACAACUCCCUCGACUAA | −6 | 30 | 0.276 | 0.798 | 0.808 | 1.043 | 1.31 | 1.299 |
| | ACAU | CUUUGAAAGUCCUUUCAUG | | | | | | | | |
| | −20_4-4_bulge-symmetric_UGGU- | AAUAGCUCCACGGCUACUA | | | | | | | | |
| | UAGU | GUGUCCUUUACUAGUCACU | | | | | | | | |
| | −6_6-6_internal_loop- | GUCGUACAUUGGCCACUCCC | | | | | | | | |
| | symmetric_AUUCAU-CUAGUG | AGU | | | | | | | | |
| | 0_1-1_mismatch_A-C | | | | | | | | | |
| | 5_2-2_bulge-symmetric_UG-GC | | | | | | | | | |
| | 30_6-6_internal_loop- | | | | | | | | | |
| | symmetric_GCCAAG-GACUAA | | | | | | | | | |
| 2631 | −8_6-6_internal_loop- | GCCACAACUCCCUCCUAUAG | −8 | 28 | 0.381 | 0.759 | 0.749 | 1.048 | 1.145 | 1.165 |
| | symmetric_GAAUUC-CGCCGA | AGUUGAAAGUCCUUUCAUG | | | | | | | | |
| | 0_1-1_mismatch_A-C | AAUACAUCUACGGCUAAUC | | | | | | | | |
| | 2_1-1_wobble_G-U | GCCGACUUUACACCACACUG | | | | | | | | |
| | 28_6-6_internal_loop- | UCGUCGAAUGGCCACUCCCA | | | | | | | | |
| | symmetric_AGGCCA-AUAGAG | GU | | | | | | | | |
| 2632 | −16_6-6_internal_loop- | GCCACAACUCCCUCCUCUCA | −16 | 28 | 0.399 | 0.812 | 0.81 | 0.999 | 1.185 | 1.338 |
| | symmetric_GUGUAA-AAUGAA | AGUUGAAAGUCCUUUCAUG | | | | | | | | |
| | −5_4-1_bulge-asymmetric_CAUU-U | AAUAUAUCCACGGCUUAAU | | | | | | | | |
| | 0_1-1_mismatch_A-C | UCCUAAUGAACACACUGUC | | | | | | | | |
| | 6_1-1_wobble_G-U | GUCGAAUGGCCACUCCCAG | | | | | | | | |
| | 28_6-6_internal_loop- | U | | | | | | | | |
| | symmetric_AGGCCA-CUCAAG | | | | | | | | | |
| 2633 | −6_6-6_internal_loop- | GCCACAACUCCCUCGCAUCA | −6 | 30 | 0.243 | 0.822 | 0.771 | 0.97 | 1.234 | 1.231 |
| | symmetric_AUUCAU-CGUCGC | CUUUGAAAGUACUUUCAUU | | | | | | | | |
| | 0_1-1_mismatch_A-C | AAUACAUCCACGGCUACGU | | | | | | | | |
| | 11_1-1_mismatch_C-U | CGCUCCUUUACACCACACUG | | | | | | | | |
| | 19_1-1_mismatch_G-A | UCGUCGAAUGGCCACUCCCA | | | | | | | | |
| | 30_6-6_internal_loop- | GU | | | | | | | | |
| | symmetric_GCCAAG-GCAUCA | | | | | | | | | |
| 2634 | −16_6-6_internal_loop- | GCCACAACUCCCUCAAAACA | −16 | 30 | 0.24 | 0.834 | 0.682 | 0.946 | 1.215 | 1.366 |
| | symmetric_GUGUAA-GAGAUG | CUUUGAAAGUCCUUUCAUG | | | | | | | | |
| | −4_1-0_bulge-asymmetric_A- | AAUGUCUCCACGGCAAUGA | | | | | | | | |
| | 0_1-1_mismatch_A-C | AUUCCUGAGAUGCACACUG | | | | | | | | |
| | 5_2-2_bulge-symmetric_UG-UC | UCGUCGAAUGGCCACUCCCA | | | | | | | | |
| | 7_1-1_wobble_U-G | GU | | | | | | | | |
| | 30_6-6_internal_loop- | | | | | | | | | |
| | symmetric_GCCAAG-AAAACA | | | | | | | | | |
| 2635 | −12_6-6_internal_loop- | GCCACAACUCCCUCCUUGAU | −12 | 26 | 0.272 | 0.774 | 0.747 | 0.961 | 1.164 | 1.281 |
| | symmetric_AAAGGA-AGUAAA | AAUCGAAAGUCCUUUCAUG | | | | | | | | |
| | −2_2-1_bulge-asymmetric_GC-A | AAUACAUCCACGAUAAUGA | | | | | | | | |
| | 0_1-1_mismatch_A-C | AUAGUAAAACACCACACUG | | | | | | | | |
| | 26_6-6_internal_loop- | UCGUCGAAUGGCCACUCCCA | | | | | | | | |
| | symmetric_AAAGGC-AUAAUC | GU | | | | | | | | |
| 2636 | −8_6-6_internal_loop- | GCCACAACUCCCUCCUUGAU | −8 | 26 | 0.254 | 0.784 | 0.77 | 0.898 | 1.212 | 1.225 |
| | symmetric_GAAUUC-AAAACA | AGUGGAAAGUCCUUUCAUG | | | | | | | | |
| | −6_1-1_wobble_U-G | AUUACAUCCACGGCUAGUA | | | | | | | | |
| | 0_1-1_mismatch_A-C | AAACACUUUACACCACACU | | | | | | | | |
| | 9_1-1_mismatch_U-U | GUCGUCGAAUGGCCACUCCC | | | | | | | | |
| | 26_6-6_internal_loop- | AGU | | | | | | | | |
| | symmetric_AAAGGC-AUAGUG | | | | | | | | | |
| 2637 | −33_4-4_bulge-symmetric_UUCG- | GCCACACAGACCUCCUUGAU | −8 | 26 | 0.256 | 0.901 | 0.902 | 1.092 | 1.609 | 1.536 |
| | ACAU | AGUGGAAAGUCCUUUCAUG | | | | | | | | |
| | −20_4-4_bulge-symmetric_UGGU- | AUUACAUCCACGGCUAGUA | | | | | | | | |
| | UAGU | AAACACUUUACUAGUCACU | | | | | | | | |
| | −8_6-6_internal_loop- | GUCGUACAUUGGCCACUCCC | | | | | | | | |
| | symmetric_GAAUUC-AAAACA | AGU | | | | | | | | |
| | −6_1-1_wobble_U-G | | | | | | | | | |
| | 0_1-1_mismatch_A-C | | | | | | | | | |
| | 9_1-1_mismatch_U-U | | | | | | | | | |
| | 26_6-6_internal_loop- | | | | | | | | | |
| | symmetric_AAAGGC-AUAGUG | | | | | | | | | |
| | 40_4-4_bulge-symmetric_GAGU- | | | | | | | | | |
| | CAGA | | | | | | | | | |
| 2638 | −10_6-6_internal_loop- | GCCACAACUCCCUCCUAGUA | −10 | 28 | 0.31 | 0.741 | 0.734 | 0.99 | 1.234 | 1.218 |
| | symmetric_AGGAAU-UCUGAG | GGUUGAAAGUCCUUUCAUU | | | | | | | | |
| | 0_1-1_mismatch_A-C | AAUAACUCCACGGCUAAUG | | | | | | | | |
| | 5_2-2_bulge-symmetric_UG-AC | AUCUGAGUUACACCACACU | | | | | | | | |
| | 11_1-1_mismatch_C-U | GUCGUCGAAUGGCCACUCCC | | | | | | | | |
| | 28_6-6_internal_loop- | AGU | | | | | | | | |
| | symmetric_AGGCCA-AGUAGG | | | | | | | | | |
| 2639 | −18_6-6_internal_loop- | GCCACAACUCCCUCCUUGGC | −18 | 24 | 0.322 | 0.814 | 0.769 | 0.937 | 1.235 | 1.283 |
| | symmetric_UGGUGU-UGAAGU | AACGCUAAGUCCUUUCAUG | | | | | | | | |
| | −5_1-1_mismatch_U-C | AAUACAUCCACGGCUCAUG | | | | | | | | |
| | 0_1-1_mismatch_A-C | AAUUCCUUUUGAAGUCACU | | | | | | | | |
| | 24_6-6_internal_loop- | GUCGUCGAAUGGCCACUCCC | | | | | | | | |
| | symmetric_UCAAAG-AACGCU | AGU | | | | | | | | |
| 2640 | −33_4-4_bulge-symmetric_UUCG- | GCCACACAGACCUCCUUGGC | −18 | 24 | 0.283 | 0.914 | 0.911 | 1.064 | 1.58 | 1.513 |
| | ACAU | AACGCUAAGUCCUUUCAUG | | | | | | | | |
| | −18_6-6_internal_loop- | AAUACAUCCACGGCUCAUG | | | | | | | | |
| | symmetric_UGGUGU-UGAAGU | AAUUCCUUUUGAAGUCACU | | | | | | | | |
| | −5_1-1_mismatch_U-C | GUCGUACAUUGGCCACUCCC | | | | | | | | |
| | 0_1-1_mismatch_A-C | AGU | | | | | | | | |
| | 24_6-6_internal_loop- | | | | | | | | | |
| | symmetric_UCAAAG-AACGCU | | | | | | | | | |
| | 40_4-4_bulge-symmetric_GAGU- | | | | | | | | | |
| | CAGA | | | | | | | | | |
| 2641 | −14_6-6_internal_loop- | GCCACAACUCCCUCCUUGGC | −14 | 24 | 0.284 | 0.749 | 0.728 | 0.916 | 1.26 | 1.231 |
| | symmetric_GUAAAG-GACCUG | AACGCUAAGUCCUUUCAUG | | | | | | | | |
| | −5_1-1_mismatch_U-C | AAUACAUCCACGGCUCAUG | | | | | | | | |
| | 0_1-1_mismatch_A-C | AAUUCGACCUGACCACACU | | | | | | | | |
| | 24_6-6_internal_loop- | GUCGUCGAAUGGCCACUCCC | | | | | | | | |
| | symmetric_UCAAAG-AACGCU | AGU | | | | | | | | |
| 2642 | −16_6-6_internal_loop- | GCCACAACUCCCUCCUACAU | −16 | 28 | 0.247 | 0.741 | 0.65 | 1.002 | 1.208 | 1.101 |
| | symmetric_GUGUAA-AUUUUA | UAUUGAAAGUCCUUUCAUG | | | | | | | | |
| | −4_2-0_bulge-asymmetric_UA- | AAUCCAUCCACGGCAUGAA | | | | | | | | |
| | 0_1-1_mismatch_A-C | UUCCUAUUUUACACACUGU | | | | | | | | |
| | 7_1-1_mismatch_U-C | CGUCGAAUGGCCACUCCCAG | | | | | | | | |
| | 28_6-6_internal_loop- | U | | | | | | | | |
| | symmetric_AGGCCA-ACAUUA | | | | | | | | | |
| 2643 | −6_6-6_internal_loop- | GCCACAACUCCCGAAGCCGC | −6 | 32 | 0.367 | 0.799 | 0.785 | 1.032 | 1.225 | 1.122 |
| | symmetric_AUUCAU-CCGCCC | CUUUGAAAGUCCUUUCAUG | | | | | | | | |
| | 0_1-1_mismatch_A-C | AAUAGAUCCACGGCUACCG | | | | | | | | |
| | 6_1-1_mismatch_G-G | CCCUCCUUUACACCACACUG | | | | | | | | |
| | 32_6-6_internal_loop- | UCGUCGAAUGGCCACUCCCA | | | | | | | | |
| | symmetric_CAAGGA-GAAGCC | GU | | | | | | | | |
| 2644 | −33_4-4_bulge-symmetric_UUCG- | GCCACACAGACCGAAGCCGC | −6 | 32 | 0.408 | 0.921 | 0.915 | 1.18 | 1.442 | 1.532 |
| | ACAU | CUUUGAAAGUCCUUUCAUG | | | | | | | | |
| | −20_4-4_bulge-symmetric_UGGU- | AAUAGAUCCACGGCUACCG | | | | | | | | |
| | UAGU | CCCUCCUUUACUAGUCACUG | | | | | | | | |
| | −6_6-6_internal_loop- | UCGUACAUUGGCCACUCCCA | | | | | | | | |
| | symmetric_AUUCAU-CCGCCC | GU | | | | | | | | |
| | 0_1-1_mismatch_A-C | | | | | | | | | |
| | 6_1-1_mismatch_G-G | | | | | | | | | |
| | 32_6-6_internal_loop- | | | | | | | | | |
| | symmetric_CAAGGA-GAAGCC | | | | | | | | | |
| | 40_4-4_bulge-symmetric_GAGU- | | | | | | | | | |
| | CAGA | | | | | | | | | |
| 2645 | −14_6-6_internal_loop- | GCCACAACUCCCUCGACACG | −14 | 30 | 0.315 | 0.814 | 0.764 | 1.035 | 1.244 | 1.315 |
| | symmetric_GUAAAG-GGAAUG | CUUUGAAAGUCCUUUCAUG | | | | | | | | |
| | −5_2-0_bulge-asymmetric_UU- | AAUACAUCCACGGCUUGAA | | | | | | | | |
| | 0_1-1_mismatch_A-C | UUCGGAAUGACCACACUGU | | | | | | | | |
| | 30_6-6_internal_loop- | CGUCGAAUGGCCACUCCCAG | | | | | | | | |
| | symmetric_GCCAAG-GACACG | U | | | | | | | | |
| 2646 | −8_6-6_internal_loop- | GCCACAACUCCCUCCUUGGC | −8 | 24 | 0.273 | 0.806 | 0.677 | 0.895 | 1.18 | 1.198 |
| | symmetric_GAAUUC-CCUUGG | GGGGUUAAGUCCUUUCAUG | | | | | | | | |
| | 0_1-1_mismatch_A-C | AAUACACCCACGGCUAAUCC | | | | | | | | |
| | 4_1-1_mismatch_A-C | UUGGCUUUACACCACACUG | | | | | | | | |
| | 24_6-6_internal_loop- | UCGUCGAAUGGCCACUCCCA | | | | | | | | |
| | symmetric_UCAAAG-GGGGUU | GU | | | | | | | | |
| 2647 | −16_6-6_internal_loop- | GCCACAACUCCCUCCUUGUA | −16 | 26 | 0.264 | 0.792 | 0.739 | 0.943 | 1.224 | 1.3 |
| | symmetric_GUGUAA-CCUCUA | GGAGGAAAGUCCUUUCAUU | | | | | | | | |
| | −7_0-1_bulge-asymmetric_-G | AAUACAUCCACGGCUAAUG | | | | | | | | |
| | 0_1-1_mismatch_A-C | GAAUUCCUCCUCUACACACU | | | | | | | | |
| | 11_1-1_mismatch_C-U | GUCGUCGAAUGGCCACUCCC | | | | | | | | |
| | 26_6-6_internal_loop- | AGU | | | | | | | | |
| | symmetric_AAAGGC-UAGGAG | | | | | | | | | |
| 2648 | −10_6-6_internal_loop- | GCCACAACUCCCUCCUUGUA | −10 | 26 | 0.34 | 0.777 | 0.737 | 0.926 | 1.183 | 1.175 |
| | symmetric_AGGAAU-CGAAGA | ACGCGAAAGUCCUUUCAUG | | | | | | | | |
| | −5_1-1_mismatch_U-C | AAUACAUCCACGGCUCAUG | | | | | | | | |
| | 0_1-1_mismatch_A-C | ACGAAGAUUACACCACACU | | | | | | | | |
| | 26_6-6_internal_loop- | GUCGUCGAAUGGCCACUCCC | | | | | | | | |
| | symmetric_AAAGGC-UAACGC | AGU | | | | | | | | |
| 2649 | −33_4-4_bulge-symmetric_UUCG- | GCCACACAGACCUCCUUGUA | −10 | 26 | 0.306 | 0.886 | 0.887 | 1.097 | 1.499 | 1.415 |
| | ACAU | ACGCGAAAGUCCUUUCAUG | | | | | | | | |
| | −20_4-4_bulge-symmetric_UGGU- | AAUACAUCCACGGCUCAUG | | | | | | | | |
| | UAGU | ACGAAGAUUACUAGUCACU | | | | | | | | |
| | −10_6-6_internal_loop- | GUCGUACAUUGGCCACUCCC | | | | | | | | |
| | symmetric_AGGAAU-CGAAGA | AGU | | | | | | | | |
| | −5_1-1_mismatch_U-C | | | | | | | | | |
| | 0_1-1_mismatch_A-C | | | | | | | | | |
| | 26_6-6_internal_loop- | | | | | | | | | |
| | symmetric_AAAGGC-UAACGC | | | | | | | | | |
| | 40_4-4_bulge-symmetric_GAGU- | | | | | | | | | |
| | CAGA | | | | | | | | | |
| 2650 | −10_6-6_internal_loop- | GCCACAACUCCCUCCUAUCA | −10 | 28 | 0.351 | 0.803 | 0.809 | 1.029 | 1.227 | 1.302 |
| | symmetric_AGGAAU-CGCAGA | ACUUGAAAGUCCUUUCAUG | | | | | | | | |
| | 0_1-1_mismatch_A-C | CAUACAUCCACGGCUAAUG | | | | | | | | |
| | 10_1-1_mismatch_U-C | ACGCAGAUUACACCACACU | | | | | | | | |
| | 28_6-6_internal_loop- | GUCGUCGAAUGGCCACUCCC | | | | | | | | |
| | symmetric_AGGCCA-AUCAAC | AGU | | | | | | | | |
| 2651 | −33_4-4_bulge-symmetric_UUCG- | GCCACACAGACCUCCUAUCA | −10 | 28 | 0.259 | 0.886 | 0.886 | 1.121 | 1.502 | 1.536 |
| | ACAU | ACUUGAAAGUCCUUUCAUG | | | | | | | | |
| | −20_4-4_bulge-symmetric_UGGU- | CAUACAUCCACGGCUAAUG | | | | | | | | |
| | UAGU | ACGCAGAUUACUAGUCACU | | | | | | | | |
| | −10_6-6_internal_loop- | GUCGUACAUUGGCCACUCCC | | | | | | | | |
| | symmetric_AGGAAU-CGCAGA | AGU | | | | | | | | |
| | 0_1-1_mismatch_A-C | | | | | | | | | |
| | 10_1-1_mismatch_U-C | | | | | | | | | |
| | 28_6-6_internal_loop- | | | | | | | | | |
| | symmetric_AGGCCA-AUCAAC | | | | | | | | | |
| | 40_4-4_bulge-symmetric_GAGU- | | | | | | | | | |
| | CAGA | | | | | | | | | |
| 2652 | −14_6-6_internal_loop- | GCCACAACUCCCUCAGCCAG | −14 | 30 | 0.246 | 0.83 | 0.823 | 1.062 | 1.396 | 1.303 |
| | symmetric_GUAAAG-GACGCA | CUUUGAAAGUACUUUCAUG | | | | | | | | |
| | −6_1-1_wobble_U-G | AAUACAUCCACGGAGUGAA | | | | | | | | |
| | −3_2-0_bulge-asymmetric_AG- | UUCGACGCAACCACACUGUC | | | | | | | | |
| | 0_1-1_mismatch_A-C | GUCGAAUGGCCACUCCCAG | | | | | | | | |
| | 19_1-1_mismatch_G-A | U | | | | | | | | |
| | 30_6-6_internal_loop- | | | | | | | | | |
| | symmetric_GCCAAG-AGCCAG | | | | | | | | | |
| 2653 | −6_6-6_internal_loop- | GCCACAACUCCCAGGAUCGC | −6 | 32 | 0.195 | 0.889 | 0.839 | 0.921 | 1.436 | 1.309 |
| | symmetric_AUUCAU-CGACAG | CUUUGAAAGUCCUUCCCUG | | | | | | | | |
| | 0_1-1_mismatch_A-C | AAUACAUCCACGGCUACGA | | | | | | | | |
| | 13_1-1_mismatch_U-C | CAGUCCUUUACACCACACUG | | | | | | | | |
| | 15_1-1_mismatch_A-C | UCGUCGAAUGGCCACUCCCA | | | | | | | | |
| | 32_6-6_internal_loop- | GU | | | | | | | | |
| | symmetric_CAAGGA-AGGAUC | | | | | | | | | |
| 2654 | −10_6-6_internal_loop- | GCCACAACUCCCUCCUCUCG | −10 | 28 | 0.303 | 0.798 | 0.781 | 1.006 | 1.222 | 1.183 |
| | symmetric_AGGAAU-UAGAGC | AGUUGAAAGUCCUUUCAUG | | | | | | | | |
| | −6_2-2_bulge-symmetric_AU-CG | AAUACAUCCACGGCUACGG | | | | | | | | |
| | 0_1-1_mismatch_A-C | AUAGAGCUUACACCACACU | | | | | | | | |
| | 28_6-6_internal_loop- | GUCGUCGAAUGGCCACUCCC | | | | | | | | |
| | symmetric_AGGCCA-CUCGAG | AGU | | | | | | | | |
| 2655 | −33_4-4_bulge-symmetric_UUCG- | GCCACACAGACCUCCUCUCG | −10 | 28 | 0.246 | 0.838 | 0.831 | 1.047 | 1.493 | 1.473 |
| | ACAU | AGUUGAAAGUCCUUUCAUG | | | | | | | | |
| | −20_4-4_bulge-symmetric_UGGU- | AAUACAUCCACGGCUACGG | | | | | | | | |
| | UAGU | AUAGAGCUUACUAGUCACU | | | | | | | | |
| | −10_6-6_internal_loop- | GUCGUACAUUGGCCACUCCC | | | | | | | | |
| | symmetric_AGGAAU-UAGAGC | AGU | | | | | | | | |
| | −6_2-2_bulge-symmetric_AU-CG | | | | | | | | | |
| | 0_1-1_mismatch_A-C | | | | | | | | | |
| | 28_6-6_internal_loop- | | | | | | | | | |
| | symmetric_AGGCCA-CUCGAG | | | | | | | | | |
| | 40_4-4_bulge-symmetric_GAGU- | | | | | | | | | |
| | CAGA | | | | | | | | | |
| 2656 | −18_6-6_internal_loop- | GCCACAACUCCCUCCUCUCA | −18 | 28 | 0.115 | 0.819 | 0.831 | 0.936 | 1.259 | 1.278 |
| | symmetric_UGGUGU-UGUAAU | UCUUGAAAGUCGACUUUCA | | | | | | | | |
| | −3_2-0_bulge-asymmetric_AG- | UGAAUACAUCCACGGAAUG | | | | | | | | |
| | 0_1-1_mismatch_A-C | AAUUCCUUUUGUAAUCACU | | | | | | | | |
| | 18_0-2_bulge-asymmetric_-GA | GUCGUCGAAUGGCCACUCCC | | | | | | | | |
| | 28_6-6_internal_loop- | AGU | | | | | | | | |
| | symmetric_AGGCCA-CUCAUC | | | | | | | | | |
| 2657 | −6_6-6_internal_loop- | GCCACAACUCCCUCCUUGAU | −6 | 26 | 0.285 | 0.748 | 0.751 | 0.964 | 1.192 | 1.153 |
| | symmetric_AUUCAU-UCAUAC | AGGCGAAAGUCCUUUCAUG | | | | | | | | |
| | 0_1-1_mismatch_A-C | AAUAACUCCACGGCUAUCA | | | | | | | | |
| | 5_2-2_bulge-symmetric_UG-AC | UACUCCUUUACACCACACUG | | | | | | | | |
| | 26_6-6_internal_loop- | UCGUCGAAUGGCCACUCCCA | | | | | | | | |
| | symmetric_AAAGGC-AUAGGC | GU | | | | | | | | |
| 2658 | −8_6-6_internal_loop- | GCCACAACUCCCUCCUCUAA | −8 | 28 | 0.396 | 0.808 | 0.826 | 1.089 | 1.234 | 1.366 |
| | symmetric_GAAUUC-AACUGG | AGUUGAAAGUCCUUUCAUG | | | | | | | | |
| | −2_2-1_bulge-asymmetric_GC-A | AAUACAUCCACGAUAAUAA | | | | | | | | |
| | 0_1-1_mismatch_A-C | CUGGCUUUACACCACACUG | | | | | | | | |
| | 28_6-6_internal_loop- | UCGUCGAAUGGCCACUCCCA | | | | | | | | |
| | symmetric_AGGCCA-CUAAAG | GU | | | | | | | | |
| 2659 | −33_4-4_bulge-symmetric_UUCG- | GCCACACAGACCUCCUCUAA | −8 | 28 | 0.349 | 0.909 | 0.883 | 1.166 | 1.632 | 1.591 |
| | ACAU | AGUUGAAAGUCCUUUCAUG | | | | | | | | |
| | −20_4-4_bulge-symmetric_UGGU- | AAUACAUCCACGAUAAUAA | | | | | | | | |
| | UAGU | CUGGCUUUACUAGUCACUG | | | | | | | | |
| | −8_6-6_internal_loop- | UCGUACAUUGGCCACUCCCA | | | | | | | | |
| | symmetric_GAAUUC-AACUGG | GU | | | | | | | | |
| | −2_2-1_bulge-asymmetric_GC-A | | | | | | | | | |
| | 0_1-1_mismatch_A-C | | | | | | | | | |
| | 28_6-6_internal_loop- | | | | | | | | | |
| | symmetric_AGGCCA-CUAAAG | | | | | | | | | |
| | 40_4-4_bulge-symmetric_GAGU- | | | | | | | | | |
| | CAGA | | | | | | | | | |
| 2660 | −10_6-6_internal_loop- | GCCACAACUCCCUCCUGAUA | −10 | 28 | 0.315 | 0.808 | 0.776 | 1.011 | 1.252 | 1.152 |
| | symmetric_AGGAAU-CAAGAA | UGUUGAAAGUCCUUUCCUG | | | | | | | | |
| | −6_2-1_bulge-asymmetric_AU-C | AAUACAUCCACGGCUACGA | | | | | | | | |
| | 0_1-1_mismatch_A-C | CAAGAAUUACACCACACUG | | | | | | | | |
| | 13_1-1_mismatch_U-C | UCGUCGAAUGGCCACUCCCA | | | | | | | | |
| | 28_6-6_internal_loop- | GU | | | | | | | | |
| | symmetric_AGGCCA-GAUAUG | | | | | | | | | |
| 2661 | −33_4-4_bulge-symmetric_UUCG- | GCCACACAGACCUCCUGAUA | −10 | 28 | 0.205 | 0.897 | 0.893 | 1.062 | 1.621 | 1.619 |
| | ACAU | UGUUGAAAGUCCUUUCCUG | | | | | | | | |
| | −20_4-4_bulge-symmetric_UGGU- | AAUACAUCCACGGCUACGA | | | | | | | | |
| | UAGU | CAAGAAUUACUAGUCACUG | | | | | | | | |
| | −10_6-6_internal_loop- | UCGUACAUUGGCCACUCCCA | | | | | | | | |
| | symmetric_AGGAAU-CAAGAA | GU | | | | | | | | |
| | −6_2-1_bulge-asymmetric_AU-C | | | | | | | | | |
| | 0_1-1_mismatch_A-C | | | | | | | | | |
| | 13_1-1_mismatch_U-C | | | | | | | | | |
| | 28_6-6_internal_loop- | | | | | | | | | |
| | symmetric_AGGCCA-GAUAUG | | | | | | | | | |
| | 40_4-4_bulge-symmetric_GAGU- | | | | | | | | | |
| | CAGA | | | | | | | | | |
| 2662 | −10_6-6_internal_loop- | GCCACAACUCCCUCCUACAA | −10 | 28 | 0.329 | 0.785 | 0.82 | 1.02 | 1.183 | 1.248 |
| | symmetric_AGGAAU-CGGAGA | ACUUGAAAGUCCUUUCAUG | | | | | | | | |
| | −6_0-1_bulge-asymmetric_-U | AAUACAACCACGGCUAAUU | | | | | | | | |
| | 0_1-1_mismatch_A-C | GACGGAGAUUACACCACAC | | | | | | | | |
| | 4_1-1_mismatch_A-A | UGUCGUCGAAUGGCCACUC | | | | | | | | |
| | 28_6-6_internal_loop- | CCAGU | | | | | | | | |
| | symmetric_AGGCCA-ACAAAC | | | | | | | | | |
| 2663 | −33_4-4_bulge-symmetric_UUCG- | GCCACACAGACCUCCUACAA | −10 | 28 | 0.371 | 0.875 | 0.894 | 1.193 | 1.48 | 1.471 |
| | ACAU | ACUUGAAAGUCCUUUCAUG | | | | | | | | |
| | −20_4-4_bulge-symmetric_UGGU- | AAUACAACCACGGCUAAUU | | | | | | | | |
| | UAGU | GACGGAGAUUACUAGUCAC | | | | | | | | |
| | −10_6-6_internal_loop- | UGUCGUACAUUGGCCACUC | | | | | | | | |
| | symmetric_AGGAAU-CGGAGA | CCAGU | | | | | | | | |
| | −6_0-1_bulge-asymmetric_-U | | | | | | | | | |
| | 0_1-1_mismatch_A-C | | | | | | | | | |
| | 4_1-1_mismatch_A-A | | | | | | | | | |
| | 28_6-6_internal_loop- | | | | | | | | | |
| | symmetric_AGGCCA-ACAAAC | | | | | | | | | |
| | 40_4-4_bulge-symmetric_GAGU- | | | | | | | | | |
| | CAGA | | | | | | | | | |
| 2664 | −10_6-6_internal_loop- | GCCACAACUCCCUCCUGAAU | −10 | 28 | 0.333 | 0.794 | 0.771 | 1.081 | 1.228 | 1.21 |
| | symmetric_AGGAAU-UCUGAG | GAUUGAAAGUCCUUUCAUG | | | | | | | | |
| | −4_2-0_bulge-asymmetric_UA- | AAUACAUCCACGGCAUGAU | | | | | | | | |
| | 0_1-1_mismatch_A-C | CUGAGUUACACCACACUGU | | | | | | | | |
| | 28_6-6_internal_loop- | CGUCGAAUGGCCACUCCCAG | | | | | | | | |
| | symmetric_AGGCCA-GAAUGA | U | | | | | | | | |
| 2665 | −16_6-6_internal_loop- | GCCACAACUCCCUCCUCAUG | −16 | 28 | 0.215 | 0.767 | 0.77 | 0.949 | 1.164 | 1.242 |
| | symmetric_GUGUAA-GGAAUG | AGUUGAAAGUCCUUUCAUG | | | | | | | | |
| | −3_4-3_bulge-asymmetric_UUAG- | AAUACAUCCACGGACUUGA | | | | | | | | |
| | ACU | AUUCCUGGAAUGCACACUG | | | | | | | | |
| | 0_1-1_mismatch_A-C | UCGUCGAAUGGCCACUCCCA | | | | | | | | |
| | 28_6-6_internal_loop- | GU | | | | | | | | |
| | symmetric_AGGCCA-CAUGAG | | | | | | | | | |
| 2666 | −14_6-6_internal_loop- | GCCACAACUCCCUCCUUGUA | −14 | 26 | 0.29 | 0.757 | 0.781 | 0.879 | 1.187 | 1.213 |
| | symmetric_GUAAAG-GCGCUG | AGGAGAAAGUCCUUUCAUG | | | | | | | | |
| | −4_3-3_bulge-symmetric_UUA-GGC | AAUACAUCCACGGCGGCUG | | | | | | | | |
| | 0_1-1_mismatch_A-C | AAUUCGCGCUGACCACACU | | | | | | | | |
| | 26_6-6_internal_loop- | GUCGUCGAAUGGCCACUCCC | | | | | | | | |
| | symmetric_AAAGGC-UAAGGA | AGU | | | | | | | | |
| 2667 | −4_6-6_internal_loop- | GCCACAACUCCCUCCUCAUU | −4 | 28 | 0.288 | 0.849 | 0.846 | 1.04 | 1.249 | 1.285 |
| | symmetric_UCAUUA-GGCGAU | GAUUGAAAGUCCUUUCAUG | | | | | | | | |
| | 0_1-1_mismatch_A-C | AAUACCCCACGGCGGCGAU | | | | | | | | |
| | 4_2-1_bulge-asymmetric_AU-C | AUUCCUUUACACCACACUG | | | | | | | | |
| | 28_6-6_internal_loop- | UCGUCGAAUGGCCACUCCCA | | | | | | | | |
| | symmetric_AGGCCA-CAUUGA | GU | | | | | | | | |
| 2668 | −33_4-4_bulge-symmetric_UUCG- | GCCACACAGACCUCCUCAUU | −4 | 28 | 0.105 | 0.86 | 0.887 | 0.995 | 1.603 | 1.643 |
| | ACAU | GAUUGAAAGUCCUUUCAUG | | | | | | | | |
| | −20_4-4_bulge-symmetric_UGGU- | AAUACCCCACGGCGGCGAU | | | | | | | | |
| | UAGU | AUUCCUUUACUAGUCACUG | | | | | | | | |
| | −4_6-6_internal_loop- | UCGUACAUUGGCCACUCCCA | | | | | | | | |
| | symmetric_UCAUUA-GGCGAU | GU | | | | | | | | |
| | 0_1-1_mismatch_A-C | | | | | | | | | |
| | 4_2-1_bulge-asymmetric_AU-C | | | | | | | | | |
| | 28_6-6_internal_loop- | | | | | | | | | |
| | symmetric_AGGCCA-CAUUGA | | | | | | | | | |
| | 40_4-4_bulge-symmetric_GAGU- | | | | | | | | | |
| | CAGA | | | | | | | | | |
| 2669 | −10_6-6_internal_loop- | GCCACAACUCCCUCCUUGAU | −10 | 26 | 0.329 | 0.801 | 0.734 | 0.906 | 1.227 | 0.988 |
| | symmetric_AGGAAU-CGAUAG | AAUCGAAAGUCCUUUCAUG | | | | | | | | |
| | −5_2-2_bulge-symmetric_UU-CU | AAUACAUCCACGGCUCUUG | | | | | | | | |
| | 0_1-1_mismatch_A-C | ACGAUAGUUACACCACACU | | | | | | | | |
| | 26_6-6_internal_loop- | GUCGUCGAAUGGCCACUCCC | | | | | | | | |
| | symmetric_AAAGGC-AUAAUC | AGU | | | | | | | | |
| 2670 | −33_4-4_bulge-symmetric_UUCG- | GCCACACAGACCUCCUUGAU | −10 | 26 | 0.313 | 0.891 | 0.88 | 1.087 | 1.57 | 1.489 |
| | ACAU | AAUCGAAAGUCCUUUCAUG | | | | | | | | |
| | −20_4-4_bulge-symmetric_UGGU- | AAUACAUCCACGGCUCUUG | | | | | | | | |
| | UAGU | ACGAUAGUUACUAGUCACU | | | | | | | | |
| | −10_6-6_internal_loop- | GUCGUACAUUGGCCACUCCC | | | | | | | | |
| | symmetric_AGGAAU-CGAUAG | AGU | | | | | | | | |
| | −5_2-2_bulge-symmetric_UU-CU | | | | | | | | | |
| | 0_1-1_mismatch_A-C | | | | | | | | | |
| | 26_6-6_internal_loop- | | | | | | | | | |
| | symmetric_AAAGGC-AUAAUC | | | | | | | | | |
| | 40_4-4_bulge-symmetric_GAGU- | | | | | | | | | |
| | CAGA | | | | | | | | | |
| 2671 | −20_6-6_internal_loop- | GCCACAACUCCCUCCUUGAU | −20 | 26 | 0.216 | 0.769 | 0.758 | 0.962 | 1.216 | 1.186 |
| | symmetric_UGUGGU-UGGAGU | GGCGGAAAGUCCCUUCAUG | | | | | | | | |
| | −5_4-4_bulge-symmetric_CAUU- | AAUACUAUCCACGGCUCUA | | | | | | | | |
| | CUAC | CAAUUCCUUUACUGGAGUC | | | | | | | | |
| | 0_1-1_mismatch_A-C | UGUCGUCGAAUGGCCACUC | | | | | | | | |
| | 5_0-1_bulge-asymmetric_-U | CCAGU | | | | | | | | |
| | 17_1-1_mismatch_A-C | | | | | | | | | |
| | 26_6-6_internal_loop- | | | | | | | | | |
| | symmetric_AAAGGC-AUGGCG | | | | | | | | | |
| 2672 | −4_6-6_internal_loop- | GCCACAACUCCCUCCUCCAA | −4 | 28 | 0.254 | 0.798 | 0.77 | 0.965 | 1.25 | 1.219 |
| | symmetric_UCAUUA-GGUUAC | GAUUGAAAGUCCUUUCAAG | | | | | | | | |
| | 0_1-1_mismatch_A-C | AAUACAUCCACGGCGGUUA | | | | | | | | |
| | 12_1-1_mismatch_A-A | CAUUCCUUUACACCACACUG | | | | | | | | |
| | 28_6-6_internal_loop- | UCGUCGAAUGGCCACUCCCA | | | | | | | | |
| | symmetric_AGGCCA-CCAAGA | GU | | | | | | | | |
| 2673 | −33_4-4_bulge-symmetric_UUCG- | GCCACACAGACCUCCUCCAA | −4 | 28 | 0.065 | 0.908 | 0.905 | 0.949 | 1.64 | 1.649 |
| | ACAU | GAUUGAAAGUCCUUUCAAG | | | | | | | | |
| | −20_4-4_bulge-symmetric_UGGU- | AAUACAUCCACGGCGGUUA | | | | | | | | |
| | UAGU | CAUUCCUUUACUAGUCACU | | | | | | | | |
| | −4_6-6_internal_loop- | GUCGUACAUUGGCCACUCCC | | | | | | | | |
| | symmetric_UCAUUA-GGUUAC | AGU | | | | | | | | |
| | 0_1-1_mismatch_A-C | | | | | | | | | |
| | 12_1-1_mismatch_A-A | | | | | | | | | |
| | 28_6-6_internal_loop- | | | | | | | | | |
| | symmetric_AGGCCA-CCAAGA | | | | | | | | | |
| | 40_4-4_bulge-symmetric_GAGU- | | | | | | | | | |
| | CAGA | | | | | | | | | |
| 2674 | −4_6-6_internal_loop- | GCCACAACUCCCUCCUGACA | −4 | 28 | 0.377 | 0.84 | 0.821 | 1.029 | 1.255 | 1.35 |
| | symmetric_UCAUUA-GUGCAU | UAUUGAAAGUCCUUUCAUC | | | | | | | | |
| | 0_1-1_mismatch_A-C | AAUACAUCCACGGCGUGCA | | | | | | | | |
| | 11_1-1_mismatch_C-C | UAUUCCUUUACACCACACU | | | | | | | | |
| | 28_6-6_internal_loop- | GUCGUCGAAUGGCCACUCCC | | | | | | | | |
| | symmetric_AGGCCA-GACAUA | AGU | | | | | | | | |
| 2675 | −33_4-4_bulge-symmetric_UUCG- | GCCACACAGACCUCCUGACA | −4 | 28 | 0.299 | 0.904 | 0.915 | 1.154 | 1.613 | 1.568 |
| | ACAU | UAUUGAAAGUCCUUUCAUC | | | | | | | | |
| | −20_4-4_bulge-symmetric_UGGU- | AAUACAUCCACGGCGUGCA | | | | | | | | |
| | UAGU | UAUUCCUUUACUAGUCACU | | | | | | | | |
| | −4_6-6_internal_loop- | GUCGUACAUUGGCCACUCCC | | | | | | | | |
| | symmetric_UCAUUA-GUGCAU | AGU | | | | | | | | |
| | 0_1-1_mismatch_A-C | | | | | | | | | |
| | 11_1-1_mismatch_C-C | | | | | | | | | |
| | 28_6-6_internal_loop- | | | | | | | | | |
| | symmetric_AGGCCA-GACAUA | | | | | | | | | |
| | 40_4-4_bulge-symmetric_GAGU- | | | | | | | | | |
| | CAGA | | | | | | | | | |
| 2676 | −6_6-6_internal_loop- | GCCACAACUCCCUCCUGAUA | −6 | 28 | 0.316 | 0.815 | 0.761 | 1.047 | 1.302 | 1.283 |
| | symmetric_AUUCAU-UUCAUC | UGUUGAAAGUCCUUUCCUG | | | | | | | | |
| | 0_1-1_mismatch_A-C | AAUACAUUCACGGCUAUUC | | | | | | | | |
| | 3_1-1_wobble_G-U | AUCUCCUUUACACCACACUG | | | | | | | | |
| | 13_1-1_mismatch_U-C | UCGUCGAAUGGCCACUCCCA | | | | | | | | |
| | 28_6-6_internal_loop- | GU | | | | | | | | |
| | symmetric_AGGCCA-GAUAUG | | | | | | | | | |
| 2677 | −33_4-4_bulge-symmetric_UUCG- | GCCACACAGACCUCCUGAUA | −6 | 28 | 0.09 | 0.894 | 0.886 | 0.952 | 1.644 | 1.628 |
| | ACAU | UGUUGAAAGUCCUUUCCUG | | | | | | | | |
| | −20_4-4_bulge-symmetric_UGGU- | AAUACAUUCACGGCUAUUC | | | | | | | | |
| | UAGU | AUCUCCUUUACUAGUCACU | | | | | | | | |
| | −6_6-6_internal_loop- | GUCGUACAUUGGCCACUCCC | | | | | | | | |
| | symmetric_AUUCAU-UUCAUC | AGU | | | | | | | | |
| | 0_1-1_mismatch_A-C | | | | | | | | | |
| | 3_1-1_wobble_G-U | | | | | | | | | |
| | 13_1-1_mismatch_U-C | | | | | | | | | |
| | 28_6-6_internal_loop- | | | | | | | | | |
| | symmetric_AGGCCA-GAUAUG | | | | | | | | | |
| | 40_4-4_bulge-symmetric_GAGU- | | | | | | | | | |
| | CAGA | | | | | | | | | |
| 2678 | −8_6-6_internal_loop- | GCCACAACUCCCUCCUCUAU | −8 | 28 | 0.372 | 0.815 | 0.771 | 1.034 | 1.293 | 1.133 |
| | symmetric_GAAUUC-UGUUGG | UAUUGAAAGUCCUUUCAUU | | | | | | | | |
| | 0_1-1_mismatch_A-C | AAUACAUCCACGGCUAAUU | | | | | | | | |
| | 11_1-1_mismatch_C-U | GUUGGCUUUACACCACACU | | | | | | | | |
| | 28_6-6_internal_loop- | GUCGUCGAAUGGCCACUCCC | | | | | | | | |
| | symmetric_AGGCCA-CUAUUA | AGU | | | | | | | | |
| 2679 | −33_4-4_bulge-symmetric_UUCG- | GCCACACAGACCUCCUCUAU | −8 | 28 | 0.292 | 0.912 | 0.909 | 1.128 | 1.642 | 1.666 |
| | ACAU | UAUUGAAAGUCCUUUCAUU | | | | | | | | |
| | −20_4-4_bulge-symmetric_UGGU- | AAUACAUCCACGGCUAAUU | | | | | | | | |
| | UAGU | GUUGGCUUUACUAGUCACU | | | | | | | | |
| | −8_6-6_internal_loop- | GUCGUACAUUGGCCACUCCC | | | | | | | | |
| | symmetric_GAAUUC-UGUUGG | AGU | | | | | | | | |
| | 0_1-1_mismatch_A-C | | | | | | | | | |
| | 11_1-1_mismatch_C-U | | | | | | | | | |
| | 28_6-6_internal_loop- | | | | | | | | | |
| | symmetric_AGGCCA-CUAUUA | | | | | | | | | |
| | 40_4-4_bulge-symmetric_GAGU- | | | | | | | | | |
| | CAGA | | | | | | | | | |
| 2680 | −14_6-6_internal_loop- | GCCACAACUCCCUCCUAACA | −14 | 28 | 0.261 | 0.769 | 0.725 | 1.023 | 1.16 | 1.289 |
| | symmetric_GUAAAG-GGUCCG | UCUUGAAAGUCCUUUCAUG | | | | | | | | |
| | −5_3-3_bulge-symmetric_AUU-UUG | AAUACAUCCACGGCUUUGG | | | | | | | | |
| | 0_1-1_mismatch_A-C | AAUUCGGUCCGACCACACU | | | | | | | | |
| | 28_6-6_internal_loop- | GUCGUCGAAUGGCCACUCCC | | | | | | | | |
| | symmetric_AGGCCA-AACAUC | AGU | | | | | | | | |
| 2681 | −10_6-6_internal_loop- | GCCACAACUCCCUCCUCUCA | −10 | 28 | 0.317 | 0.785 | 0.701 | 1.123 | 1.242 | 1.188 |
| | symmetric_AGGAAU-UGCAUA | GGUUGAAAGUCCUUUCAUG | | | | | | | | |
| | −5_3-3_bulge-symmetric_AUU-UCC | GAUACAUCCACGGCUUCCG | | | | | | | | |
| | 0_1-1_mismatch_A-C | AUGCAUAUUACACCACACU | | | | | | | | |
| | 10_1-1_wobble_U-G | GUCGUCGAAUGGCCACUCCC | | | | | | | | |
| | 28_6-6_internal_loop- | AGU | | | | | | | | |
| | symmetric_AGGCCA-CUCAGG | | | | | | | | | |

### Example 19

### Engineered Guide RNAs Targeting LRRK2

[0443] This example describes the on-target and off-target editing efficiencies of various engineered guide RNAs disclosed herein targeting the LRRK2 G2019S mutation via ADAR. A side-by-side comparison of engineered guide RNAs with varying structural features in the guide-target RNA scaffold that forms upon hybridization of the engineered guide RNA to a target LRRK2 mRNA was assessed in cells (also referred to herein as “in trans”). Engineered guide RNAs were dosed in vitro in cells expressing ADAR1. RNA editing at the on-target adenosine and at local off-target adenosines was assessed by Sanger sequencing.

[0444] FIG. 38A-FIG. 38D show the editing profiles of four engineered guide RNAs via ADAR, including an engineered guide RNA that forms an A/C mismatch structural feature at the target adenosine (FIG. 38A), an engineered guide RNA that forms an A/C mismatch structural feature at the target adenosine and barbells at the −20 and +26 positions relative to the target adenosine (position 0) (FIG. 38B), an engineered guide RNA that forms A/G mismatch structural features at local off-target adenosines at the −14, −2, +10, and +13 positions relative to the target adenosine (position 0) (FIG. 38C), and an engineered guide RNA that forms a 1/0 asymmetrical bulge at local off-target adenosines at the −14, −2, +10, and +13 positions relative to the target adenosine (position 0) by deletion of a U opposite the local off-target adenosine (FIG. 38D). The plots shown in FIG. 38A-FIG. 38D depict the position along the target RNA on the x-axis and report percent editing on the y-axis. A diagram of the guide-target RNA scaffold for each engineered guide RNA is shown directly below each graph. As shown in FIG. 38A-FIG. 38D, simple addition of A/G mismatches or 1/0 bulges at local off-target adenosines resulted in abrogated on-target editing as compared to the A/C mismatch engineered guide RNA. The addition of a barbell macro-footprint resulted in increase of on-target editing as compared to the A/C mismatch engineered guide RNA.

[0445] An engineered guide RNA that forms a barbell macro-footprint at the −14 and +22 positions relative to the target adenosine (position 0) and which also forms a micro-footprint comprising other structural features was also evaluated in cells (FIG. 39). This engineered guide RNA displayed a boost in on-target adenosine editing and a reduction in local off-target adenosine editing as compared to the A/C mismatch engineered guide RNA.

### Example 20

### Engineering of Latent Structures of the Guide-Target RNA Scaffold to Minimize +1 Editing of ABCA4 G5882A Nucleotide Mutation for ABCA4 Resulting in a G1961E Amino Acid Mutation

[0446] This example describes engineering of latent structures of the guide-target RNA complex to minimize editing at the +1 position, relative to the target A (targeting the G5882A nucleotide mutation resulting in the G1961E amino acid mutation), in target ABCA4 RNA. As shown in FIG. 40, a candidate engineered guide RNA when bound to a target ABCA4 mRNA forms a guide-target RNA scaffold having a micro-footprint, and a macrofootprint comprising a right barbell and a left barbell. As shown in the RNA editing profile (top right of FIG. 40), the candidate engineered guide RNA facilitates 58% on target adenosine editing and 25% off-target editing at the adenosine at the +1 position (“+1 editing”). This example demonstrates that tiling of latent structures (here symmetrical loops and bulges) within the region (A) shown in FIG. 40 minimizes the amount of +1 editing relative to the target adenosine (“position 0”).

[0447] The following engineered guide RNAs recited in TABLE 8 were each used in this experiment. While the engineered guide RNA sequences in TABLE 8 are provided as DNA sequences with a T substituted for each U, the corresponding RNA sequences are also encompassed herein.

TABLE 8
ABCA4 Engineered Guide RNA Sequences

| | | SEQ | | | | |
|---|---|---|---|---|---|---|
| | | ID | | | | |
| FIG. | Guide Name | NO | Sequence | Structural Features(target/guide) | LB | RB |
| 41 | 0.92.62(−15, +33) | 2772 | TGTGGTTGTTTTGCCGGCACCATAGTGA | −15_6-5_internal_loop-asymmetric_AGUGGA-AGUGA, | −15 | 33 |
| | | | GCCAGGAGGCCAAAGCACTCTCCAGTG | −1->0_2-2_bulge-symmetric_GA-CG, 6_1- | | |
| | | | AGAACTCGGACACACAGCCTGAGTGAG | 1_mismatch_G-A, 8_1-1_mismatch_C-U, 33_6- | | |
| | | | CTGGGCTGGA | 6_internal_loop-symmetric_GAGUGA-AGUGAG | | |
| 41 | 0.92.62(−15, +33)+4(6/6) | 2773 | TGTGGTTGTTTTGCCGGCACCATAGTGA | −15_6-5_internal_loop-asymmetric_AGUGGA-AGUGA, | −15 | 33 |
| | | | GCCAGGAGGCCAAAGCTGAGAGCAGTG | −1->0_2-2_bulge-symmetric_GA-CG, 6_1- | | |
| | | | AGAACTCGGACACACAGCCTGAGTGAG | 1_mismatch_G-A, 8_1-1_mismatch_C-U,_12_6- | | |
| | | | CTGGGCTGGA | 6_internal_loop-symmetric_GAGAGU-UGAGAG, 33_6- | | |
| | | | | 6_internal_loop-symmetric_GAGUGA-AGUGAG | | |
| 41 | 0.92.62(−15, +33)+5(6/6) | 2774 | TGTGGTTGTTTTGCCGGCACCATAGTGA | −15_6-5_internal_loop-asymmetric_AGUGGA-AGUGA, | −15 | 33 |
| | | | GCCAGGAGGCCAAAGGTGAGACCAGTG | −1->0_2-2_bulge-symmetric_GA-CG, 6_1- | | |
| | | | AGAACTCGGACACACAGCCTGAGTGAG | 1_mismatch_G-A, 8_1-1_mismatch_C-U,_13_6- | | |
| | | | CTGGGCTGGA | 6_internal_loop-symmetric_AGAGUG-GUGAGA, 33_6- | | |
| | | | | 6_internal_loop-symmetric_GAGUGA-AGUGAG | | |
| 41 | 0.92.62(−15, +33)+6(6/6) | 2775 | TGTGGTTGTTTTGCCGGCACCATAGTGA | −15_6-5_internal_loop-asymmetric_AGUGGA-AGUGA, | −15 | 33 |
| | | | GCCAGGAGGCCAAATTTGAGTCCAGTG | −1->0_2-2_bulge-symmetric_GA-CG, 6_1- | | |
| | | | AGAACTCGGACACACAGCCTGAGTGAG | 1_mismatch_G-A, 8_1-1_mismatch_C-U,_14_6- | | |
| | | | CTGGGCTGGA | 6_internal_loop-symmetric_GAGUGC-UUUGAG, 33_6- | | |
| | | | | 6_internal_loop-symmetric_GAGUGA-AGUGAG | | |
| 41 | 0.92.62(−15, +33)+7(6/6) | 2776 | TGTGGTTGTTTTGCCGGCACCATAGTGA | −15_6-5_internal_loop-asymmetric_AGUGGA-AGUGA, | −15 | 33 |
| | | | GCCAGGAGGCCAATTTTGACTCCAGTGA | −1->0_2-2_bulge-symmetric_GA-CG, 6_1- | | |
| | | | GAACTCGGACACACAGCCTGAGTGAGC | 1_mismatch_G-A, 8_1-1_mismatch_C-U,_15_6- | | |
| | | | TGGGCTGGA | 6_internal_loop-symmetric_AGUGCU-UUUUGA, 33_6- | | |
| | | | | 6_internal_loop-symmetric_GAGUGA-AGUGAG | | |
| 41 | 0.92.62(−15, +33)+8(6/6) | 2777 | TGTGGTTGTTTTGCCGGCACCATAGTGA | −15_6-5_internal_loop-asymmetric_AGUGGA-AGUGA, | −15 | 33 |
| | | | GCCAGGAGGCCATTTTTGTCTCCAGTGA | −1->0_2-2_bulge-symmetric_GA-CG, 6_1- | | |
| | | | GAACTCGGACACACAGCCTGAGTGAGC | 1_mismatch_G-A, 8_1-1_mismatch_C-U,_16_6- | | |
| | | | TGGGCTGGA | 6_internal_loop-symmetric_GUGCUU-UUUUUG, 33_6- | | |
| | | | | 6_internal_loop-symmetric_GAGUGA-AGUGAG | | |
| 41 | 0.92.62(−15, +33)+9(6/6) | 2778 | TGTGGTTGTTTTGCCGGCACCATAGTGA | −15_6-5_internal_loop-asymmetric_AGUGGA-AGUGA, | −15 | 33 |
| | | | GCCAGGAGGCCTTTTTTCTCTCCAGTGA | −1->0_2-2_bulge-symmetric_GA-CG, 6_1- | | |
| | | | GAACTCGGACACACAGCCTGAGTGAGC | 1_mismatch_G-A, 8_1-1_mismatch_C-U,_17_6- | | |
| | | | TGGGCTGGA | 6_internal_loop-symmetric_UGCUUU-UUUUUU, 33_6- | | |
| | | | | 6_internal_loop-symmetric_GAGUGA-AGUGAG | | |
| 41 | 0.92.62(−15, +33)+10(6/6) | 2779 | TGTGGTTGTTTTGCCGGCACCATAGTGA | −15_6-5_internal_loop-asymmetric_AGUGGA-AGUGA, | −15 | 33 |
| | | | GCCAGGAGGCGTTTTAACTCTCCAGTGA | −1->0_2-2_bulge-symmetric_GA-CG, 6_1- | | |
| | | | GAACTCGGACACACAGCCTGAGTGAGC | 1_mismatch_G-A, 8_1-1_mismatch_C-U,_18_6- | | |
| | | | TGGGCTGGA | 6_internal_loop-symmetric_GCUUUG-GUUUUA, 33_6- | | |
| | | | | 6_internal_loop-symmetric_GAGUGA-AGUGAG | | |
| 41 | 0.92.62(−15, +33)+11(6/6) | 2780 | TGTGGTTGTTTTGCCGGCACCATAGTGA | −15_6-5_internal_loop-asymmetric_AGUGGA-AGUGA, | −15 | 33 |
| | | | GCCAGGAGGGGTTTTCACTCTCCAGTGA | −1->0_2-2_bulge-symmetric_GA-CG, 6_1- | | |
| | | | GAACTCGGACACACAGCCTGAGTGAGC | 1_mismatch_G-A, 8_1-1_mismatch_C-U,_19_6- | | |
| | | | TGGGCTGGA | 6_internal_loop-symmetric_CUUUGG-GGUUUU, 33_6- | | |
| | | | | 6_internal_loop-symmetric_GAGUGA-AGUGAG | | |
| 41 | 0.92.62(−15, +33)+12(6/6) | 2781 | TGTGGTTGTTTTGCCGGCACCATAGTGA | −15_6-5_internal_loop-asymmetric_AGUGGA-AGUGA, | −15 | 33 |
| | | | GCCAGGAGTAGGTTGCACTCTCCAGTGA | −1->0_2-2_bulge-symmetric_GA-CG, 6_1- | | |
| | | | GAACTCGGACACACAGCCTGAGTGAGC | 1_mismatch_G-A, 8_1-1_mismatch_C-U, 20_6- | | |
| | | | TGGGCTGGA | 6_internal_loop-symmetric_UUUGGC-UAGGUU, 33_6- | | |
| | | | | 6_internal_loop-symmetric_GAGUGA-AGUGAG | | |
| 41 | 0.92.62(−15, +33)+13(6/6) | 2782 | TGTGGTTGTTTTGCCGGCACCATAGTGA | −15_6-5_internal_loop-asymmetric_AGUGGA-AGUGA, | −15 | 33 |
| | | | GCCAGGATTTTTTAGCACTCTCCAGTGA | −1->0_2-2_bulge-symmetric_GA-CG, 6_1- | | |
| | | | GAACTCGGACACACAGCCTGAGTGAGC | 1_mismatch_G-A, 8_1-1_mismatch_C-U, 21_6- | | |
| | | | TGGGCTGGA | 6_internal_loop-symmetric_UUGGCC-UUUUUU, 33_6- | | |
| | | | | 6_internal_loop-symmetric_GAGUGA-AGUGAG | | |
| 41 | 0.92.62(−15, +33)+14(6/6) | 2783 | TGTGGTTGTTTTGCCGGCACCATAGTGA | −15_6-5_internal_loop-asymmetric_AGUGGA-AGUGA, | −15 | 33 |
| | | | GCCAGGTTTTTTAAGCACTCTCCAGTGA | −1->0_2-2_bulge-symmetric_GA-CG, 6_1- | | |
| | | | GAACTCGGACACACAGCCTGAGTGAGC | 1_mismatch_G-A, 8_1-1_mismatch_C-U, 22_6- | | |
| | | | TGGGCTGGA | 6_internal_loop-symmetric_UGGCCU-UUUUUU, 33_6- | | |
| | | | | 6_internal_loop-symmetric_GAGUGA-AGUGAG | | |
| 41 | 0.92.62(−15, +33)+4(5/5) | 2784 | TGTGGTTGTTTTGCCGGCACCATAGTGA | −15_6-5_internal_loop-asymmetric_AGUGGA-AGUGA, | −15 | 33 |
| | | | GCCAGGAGGCCAAAGCAGAGAGCAGTG | −1->0_2-2_bulge-symmetric_GA-CG, 6_1- | | |
| | | | AGAACTCGGACACACAGCCTGAGTGAG | 1_mismatch_G-A, 8_1-1_mismatch_C-U,_12_5- | | |
| | | | CTGGGCTGGA | 5_internal_loop-symmetric_GAGAG-GAGAG, 33_6- | | |
| | | | | 6_internal_loop-symmetric_GAGUGA-AGUGAG | | |
| 41 | 0.92.62(−15, +33)+5(5/5) | 2785 | TGTGGTTGTTTTGCCGGCACCATAGTGA | −15_6-5_internal_loop-asymmetric_AGUGGA-AGUGA, | −15 | 33 |
| | | | GCCAGGAGGCCAAAGCTGAGACCAGTG | −1->0_2-2_bulge-symmetric_GA-CG, 6_1- | | |
| | | | AGAACTCGGACACACAGCCTGAGTGAG | 1_mismatch_G-A, 8_1-1_mismatch_C-U,_13_5- | | |
| | | | CTGGGCTGGA | 5_internal_loop-symmetric_AGAGU-UGAGA, 33_6- | | |
| | | | | 6_internal_loop-symmetric_GAGUGA-AGUGAG | | |
| 41 | 0.92.62(−15, +33)+6(5/5) | 2786 | TGTGGTTGTTTTGCCGGCACCATAGTGA | −15_6-5_internal_loop-asymmetric_AGUGGA-AGUGA, | −15 | 33 |
| | | | GCCAGGAGGCCAAAGGTGAGTCCAGTG | −1->0_2-2_bulge-symmetric_GA-CG, 6_1- | | |
| | | | AGAACTCGGACACACAGCCTGAGTGAG | 1_mismatch_G-A, 8_1-1_mismatch_C-U,_14_5- | | |
| | | | CTGGGCTGGA | 5_internal_loop-symmetric_GAGUG-GUGAG, 33_6- | | |
| | | | | 6_internal_loop-symmetric_GAGUGA-AGUGAG | | |
| 41 | 0.92.62(−15, +33)+7(5/5) | 2787 | TGTGGTTGTTTTGCCGGCACCATAGTGA | −15_6-5_internal_loop-asymmetric_AGUGGA-AGUGA, | −15 | 33 |
| | | | GCCAGGAGGCCAAATTTGACTCCAGTG | −1->0_2-2_bulge-symmetric_GA-CG, 6_1- | | |
| | | | AGAACTCGGACACACAGCCTGAGTGAG | 1_mismatch_G-A, 8_1-1_mismatch_C-U,_15_5- | | |
| | | | CTGGGCTGGA | 5_internal_loop-symmetric_AGUGC-UUUGA, 33_6- | | |
| | | | | 6_internal_loop-symmetric_GAGUGA-AGUGAG | | |
| 41 | 0.92.62(−15, +33)+8(5/5) | 2788 | TGTGGTTGTTTTGCCGGCACCATAGTGA | −15_6-5_internal_loop-asymmetric_AGUGGA-AGUGA, | −15 | 33 |
| | | | GCCAGGAGGCCAATTTTGTCTCCAGTGA | −1->0_2-2_bulge-symmetric_GA-CG, 6_1- | | |
| | | | GAACTCGGACACACAGCCTGAGTGAGC | 1_mismatch_G-A, 8_1-1_mismatch_C-U,_16_5- | | |
| | | | TGGGCTGGA | 5_internal_loop-symmetric_GUGCU-UUUUG, 33_6- | | |
| | | | | 6_internal_loop-symmetric_GAGUGA-AGUGAG | | |
| 41 | 0.92.62(−15, +33)+9(5/5) | 2789 | TGTGGTTGTTTTGCCGGCACCATAGTGA | −15_6-5_internal_loop-asymmetric_AGUGGA-AGUGA, | −15 | 33 |
| | | | GCCAGGAGGCCATTTTTCTCTCCAGTGA | −1->0_2-2_bulge-symmetric_GA-CG, 6_1- | | |
| | | | GAACTCGGACACACAGCCTGAGTGAGC | 1_mismatch_G-A, 8_1-1_mismatch_C-U,_17_5- | | |
| | | | TGGGCTGGA | 5_internal_loop-symmetric_UGCUU-UUUUU, 33_6- | | |
| | | | | 6_internal_loop-symmetric_GAGUGA-AGUGAG | | |
| 41 | 0.92.62(−15, +33)+10(5/5) | 2790 | TGTGGTTGTTTTGCCGGCACCATAGTGA | −15_6-5_internal_loop-asymmetric_AGUGGA-AGUGA, | −15 | 33 |
| | | | GCCAGGAGGCCTTTTAACTCTCCAGTGA | −1->0_2-2_bulge-symmetric_GA-CG, 6_1- | | |
| | | | GAACTCGGACACACAGCCTGAGTGAGC | 1_mismatch_G-A, 8_1-1_mismatch_C-U,_18_5- | | |
| | | | TGGGCTGGA | 5_internal_loop-symmetric_GCUUU-UUUUA, 33_6- | | |
| | | | | 6_internal_loop-symmetric_GAGUGA-AGUGAG | | |
| 41 | 0.92.62(−15, +33)+11(5/5) | 2791 | TGTGGTTGTTTTGCCGGCACCATAGTGA | −15_6-5_internal_loop-asymmetric_AGUGGA-AGUGA, | −15 | 33 |
| | | | GCCAGGAGGCGTTTCCACTCTCCAGTGA | −1->0_2-2_bulge-symmetric_GA-CG, 6_1- | | |
| | | | GAACTCGGACACACAGCCTGAGTGAGC | 1_mismatch_G-A, 8_1-1_mismatch_C-U,_19_5- | | |
| | | | TGGGCTGGA | 5_internal_loop-symmetric_CUUUG-GUUUC, 33_6- | | |
| | | | | 6_internal_loop-symmetric_GAGUGA-AGUGAG | | |
| 41 | 0.92.62(−15, +33)+12(5/5) | 2792 | TGTGGTTGTTTTGCCGGCACCATAGTGA | −15_6-5_internal_loop-asymmetric_AGUGGA-AGUGA, | −15 | 33 |
| | | | GCCAGGAGGGGTTTGCACTCTCCAGTGA | −1->0_2-2_bulge-symmetric_GA-CG, 6_1- | | |
| | | | GAACTCGGACACACAGCCTGAGTGAGC | 1_mismatch_G-A, 8_1-1_mismatch_C-U, 20_5- | | |
| | | | TGGGCTGGA | 5_internal_loop-symmetric_UUUGG-GGUUU, 33_6- | | |
| | | | | 6_internal_loop-symmetric_GAGUGA-AGUGAG | | |
| 41 | 0.92.62(−15, +33)+13(5/5) | 2793 | TGTGGTTGTTTTGCCGGCACCATAGTGA | −15_6-5_internal_loop-asymmetric_AGUGGA-AGUGA, | −15 | 33 |
| | | | GCCAGGAGAATTTAGCACTCTCCAGTGA | −1->0_2-2_bulge-symmetric_GA-CG, 6_1- | | |
| | | | GAACTCGGACACACAGCCTGAGTGAGC | 1_mismatch_G-A, 8_1-1_mismatch_C-U, 21_5- | | |
| | | | TGGGCTGGA | 5_internal_loop-symmetric_UUGGC-AAUUU, 33_6- | | |
| | | | | 6_internal_loop-symmetric_GAGUGA-AGUGAG | | |
| 41 | 0.92.62(−15, +33)+14(5/5) | 2794 | TGTGGTTGTTTTGCCGGCACCATAGTGA | −15_6-5_internal_loop-asymmetric_AGUGGA-AGUGA, | −15 | 33 |
| | | | GCCAGGAAAATTAAGCACTCTCCAGTG | −1->0_2-2_bulge-symmetric_GA-CG, 6_1- | | |
| | | | AGAACTCGGACACACAGCCTGAGTGAG | 1_mismatch_G-A, 8_1-1_mismatch_C-U, 22_5- | | |
| | | | CTGGGCTGGA | 5_internal_loop-symmetric_UGGCC-AAAUU, 33_6- | | |
| | | | | 6_internal_loop-symmetric_GAGUGA-AGUGAG | | |
| 41 | 0.92.62(−15, +33)+15(5/5) | 2795 | TGTGGTTGTTTTGCCGGCACCATAGTGA | −15_6-5_internal_loop-asymmetric_AGUGGA-AGUGA, | −15 | 33 |
| | | | GCCAGGTTTAAAAAGCACTCTCCAGTGA | −1->0_2-2_bulge-symmetric_GA-CG, 6_1- | | |
| | | | GAACTCGGACACACAGCCTGAGTGAGC | 1_mismatch_G-A, 8_1-1_mismatch_C-U, 23_5- | | |
| | | | TGGGCTGGA | 5_internal_loop-symmetric_GGCCU-UUUAA, 33_6- | | |
| | | | | 6_internal_loop-symmetric_GAGUGA-AGUGAG | | |
| 42 | 0.92.62(−15, +33)+4(4/4) | 2796 | TGTGGTTGTTTTGCCGGCACCATAGTGA | −15_6-5_internal_loop-asymmetric_AGUGGA-AGUGA, | −15 | 33 |
| | | | GCCAGGAGGCCAAAGCACAGAGCAGTG | −1->0_2-2_bulge-symmetric_GA-CG, 6_1- | | |
| | | | AGAACTCGGACACACAGCCTGAGTGAG | 1_mismatch_G-A, 8_1-1_mismatch_C-U,_12_4-4_bulge- | | |
| | | | CTGGGCTGGA | symmetric_GAGA-AGAG, 33_6-6_internal_loop- | | |
| | | | | symmetric_GAGUGA-AGUGAG | | |
| 42 | 0.92.62(−15, +33)+5(4/4) | 2797 | TGTGGTTGTTTTGCCGGCACCATAGTGA | −15_6-5_internal_loop-asymmetric_AGUGGA-AGUGA, | −15 | 33 |
| | | | GCCAGGAGGCCAAAGCAGAGACCAGTG | −1->0_2-2_bulge-symmetric_GA-CG, 6_1- | | |
| | | | AGAACTCGGACACACAGCCTGAGTGAG | 1_mismatch_G-A, 8_1-1_mismatch_C-U,_13_4-4_bulge- | | |
| | | | CTGGGCTGGA | symmetric_AGAG-GAGA, 33_6-6_internal_loop- | | |
| | | | | symmetric_GAGUGA-AGUGAG | | |
| 42 | 0.92.62(−15, +33)+6(4/4) | 2798 | TGTGGTTGTTTTGCCGGCACCATAGTGA | −15_6-5_internal_loop-asymmetric_AGUGGA-AGUGA, | −15 | 33 |
| | | | GCCAGGAGGCCAAAGCTGAGTCCAGTG | −1->0_2-2_bulge-symmetric_GA-CG, 6_1- | | |
| | | | AGAACTCGGACACACAGCCTGAGTGAG | 1_mismatch_G-A, 8_1-1_mismatch_C-U,_14_4-4_bulge- | | |
| | | | CTGGGCTGGA | symmetric_GAGU-UGAG, 33_6-6_internal_loop- | | |
| | | | | symmetric_GAGUGA-AGUGAG | | |
| 42 | 0.92.62(−15, +33)+7(4/4) | 2799 | TGTGGTTGTTTTGCCGGCACCATAGTGA | −15_6-5_internal_loop-asymmetric_AGUGGA-AGUGA, | −15 | 33 |
| | | | GCCAGGAGGCCAAAGGTGACTCCAGTG | −1->0_2-2_bulge-symmetric_GA-CG, 6_1- | | |
| | | | AGAACTCGGACACACAGCCTGAGTGAG | 1_mismatch_G-A, 8_1-1_mismatch_C-U,_15_4-4_bulge- | | |
| | | | CTGGGCTGGA | symmetric_AGUG-GUGA, 33_6-6_internal_loop- | | |
| | | | | symmetric_GAGUGA-AGUGAG | | |
| 42 | 0.92.62(−15, +33)+8(4/4) | 2800 | TGTGGTTGTTTTGCCGGCACCATAGTGA | −15_6-5_internal_loop-asymmetric_AGUGGA-AGUGA, | −15 | 33 |
| | | | GCCAGGAGGCCAAATTTGTCTCCAGTGA | −1->0_2-2_bulge-symmetric_GA-CG, 6_1- | | |
| | | | GAACTCGGACACACAGCCTGAGTGAGC | 1_mismatch_G-A, 8_1-1_mismatch_C-U,_16_4-4_bulge- | | |
| | | | TGGGCTGGA | symmetric_GUGC-UUUG, 33_6-6_internal_loop- | | |
| | | | | symmetric_GAGUGA-AGUGAG | | |
| 42 | 0.92.62(−15, +33)+9(4/4) | 2801 | TGTGGTTGTTTTGCCGGCACCATAGTGA | −15_6-5_internal_loop-asymmetric_AGUGGA-AGUGA, | −15 | 33 |
| | | | GCCAGGAGGCCAATTTTCTCTCCAGTGA | −1->0_2-2_bulge-symmetric_GA-CG, 6_1- | | |
| | | | GAACTCGGACACACAGCCTGAGTGAGC | 1_mismatch_G-A, 8_1-1_mismatch_C-U,_17_4-4_bulge- | | |
| | | | TGGGCTGGA | symmetric_UGCU-UUUU, 33_6-6_internal_loop- | | |
| | | | | symmetric_GAGUGA-AGUGAG | | |
| 42 | 0.92.62(−15, +33)+10(4/4) | 2802 | TGTGGTTGTTTTGCCGGCACCATAGTGA | −15_6-5_internal_loop-asymmetric_AGUGGA-AGUGA, | −15 | 33 |
| | | | GCCAGGAGGCCATTTAACTCTCCAGTGA | −1->0_2-2_bulge-symmetric_GA-CG, 6_1- | | |
| | | | GAACTCGGACACACAGCCTGAGTGAGC | 1_mismatch_G-A, 8_1-1_mismatch_C-U,_18_4-4_bulge- | | |
| | | | TGGGCTGGA | symmetric_GCUU-UUUA, 33_6-6_internal_loop- | | |
| | | | | symmetric_GAGUGA-AGUGAG | | |
| 42 | 0.92.62(−15, +33)+11(4/4) | 2803 | TGTGGTTGTTTTGCCGGCACCATAGTGA | −15_6-5_internal_loop-asymmetric_AGUGGA-AGUGA, | −15 | 33 |
| | | | GCCAGGAGGCCTTTCCACTCTCCAGTGA | −1->0_2-2_bulge-symmetric_GA-CG, 6_1- | | |
| | | | GAACTCGGACACACAGCCTGAGTGAGC | 1_mismatch_G-A, 8_1-1_mismatch_C-U,_19_4-4_bulge- | | |
| | | | TGGGCTGGA | symmetric_CUUU-UUUC, 33_6-6_internal_loop- | | |
| | | | | symmetric_GAGUGA-AGUGAG | | |
| 42 | 0.92.62(−15, +33)+12(4/4) | 2804 | TGTGGTTGTTTTGCCGGCACCATAGTGA | −15_6-5_internal_loop-asymmetric_AGUGGA-AGUGA, | −15 | 33 |
| | | | GCCAGGAGGCGTTTGCACTCTCCAGTGA | −1->0_2-2_bulge-symmetric_GA-CG, 6_1- | | |
| | | | GAACTCGGACACACAGCCTGAGTGAGC | 1_mismatch_G-A, 8_1-1_mismatch_C-U, 20_4-4_bulge- | | |
| | | | TGGGCTGGA | symmetric_UUUG-GUUU, 33_6-6_internal_loop- | | |
| | | | | symmetric_GAGUGA-AGUGAG | | |
| 42 | 0.92.62(−15, +33)+13(4/4) | 2805 | TGTGGTTGTTTTGCCGGCACCATAGTGA | −15_6-5_internal_loop-asymmetric_AGUGGA-AGUGA, | −15 | 33 |
| | | | GCCAGGAGGATTTAGCACTCTCCAGTGA | −1->0_2-2_bulge-symmetric_GA-CG, 6_1- | | |
| | | | GAACTCGGACACACAGCCTGAGTGAGC | 1_mismatch_G-A, 8_1-1_mismatch_C-U, 21_4-4_bulge- | | |
| | | | TGGGCTGGA | symmetric_UUGG-AUUU, 33_6-6_internal_loop- | | |
| | | | | symmetric_GAGUGA-AGUGAG | | |
| 42 | 0.92.62(−15, +33)+14(4/4) | 2806 | TGTGGTTGTTTTGCCGGCACCATAGTGA | −15_6-5_internal_loop-asymmetric_AGUGGA-AGUGA, | −15 | 33 |
| | | | GCCAGGAGAATTAAGCACTCTCCAGTG | −1->0_2-2_bulge-symmetric_GA-CG, 6_1- | | |
| | | | AGAACTCGGACACACAGCCTGAGTGAG | 1_mismatch_G-A, 8_1-1_mismatch_C-U, 22_4-4_bulge- | | |
| | | | CTGGGCTGGAG | symmetric_UGGC-AAUU, 33_6-6_internal_loop- | | |
| | | | | symmetric_GAGUGA-AGUGAG | | |
| 42 | 0.92.62(−15, +33)+15(4/4) | 2807 | TGTGGTTGTTTTGCCGGCACCATAGTGA | −15_6-5_internal_loop-asymmetric_AGUGGA-AGUGA, | −15 | 33 |
| | | | GCCAGGATTAAAAAGCACTCTCCAGTG | −1->0_2-2_bulge-symmetric_GA-CG, 6_1- | | |
| | | | AGAACTCGGACACACAGCCTGAGTGAG | 1_mismatch_G-A, 8_1-1_mismatch_C-U, 23_4-4_bulge- | | |
| | | | CTGGGCTGGA | symmetric_GGCC-UUAA, 33_6-6_internal_loop- | | |
| | | | | symmetric_GAGUGA-AGUGAG | | |
| 42 | 0.92.62(−15, +33)+4(3/3) | 2808 | TGTGGTTGTTTTGCCGGCACCATAGTGA | −15_6-5_internal_loop-asymmetric_AGUGGA-AGUGA, | −15 | 33 |
| | | | GCCAGGAGGCCAAAGCACTGAGCAGTG | −1->0_2-2_bulge-symmetric_GA-CG, 6_1- | | |
| | | | AGAACTCGGACACACAGCCTGAGTGAG | 1_mismatch_G-A, 8_1-1_mismatch_C-U,_12_3-3_bulge- | | |
| | | | CTGGGCTGGA | symmetric_GAG-GAG, 33_6-6_internal_loop- | | |
| | | | | symmetric_GAGUGA-AGUGAG | | |
| 42 | 0.92.62(−15, +33)+5(3/3) | 2809 | TGTGGTTGTTTTGCCGGCACCATAGTGA | −15_6-5_internal_loop-asymmetric_AGUGGA-AGUGA, | −15 | 33 |
| | | | GCCAGGAGGCCAAAGCACAGACCAGTG | −1->0_2-2_bulge-symmetric_GA-CG, 6_1- | | |
| | | | AGAACTCGGACACACAGCCTGAGTGAG | 1_mismatch_G-A, 8_1-1_mismatch_C-U,_13_3-3_bulge- | | |
| | | | CTGGGCTGGA | symmetric_AGA-AGA, 33_6-6_internal_loop- | | |
| | | | | symmetric_GAGUGA-AGUGAG | | |
| 42 | 0.92.62(−15, +33)+6(3/3) | 2810 | TGTGGTTGTTTTGCCGGCACCATAGTGA | −15_6-5_internal_loop-asymmetric_AGUGGA-AGUGA, | −15 | 33 |
| | | | GCCAGGAGGCCAAAGCAGAGTCCAGTG | −1->0_2-2_bulge-symmetric_GA-CG, 6_1- | | |
| | | | AGAACTCGGACACACAGCCTGAGTGAG | 1_mismatch_G-A, 8_1-1_mismatch_C-U,_14_3-3_bulge- | | |
| | | | CTGGGCTGGA | symmetric_GAG-GAG, 33_6-6_internal_loop- | | |
| | | | | symmetric_GAGUGA-AGUGAG | | |
| 42 | 0.92.62(−15, +33)+7(3/3) | 2811 | TGTGGTTGTTTTGCCGGCACCATAGTGA | −15_6-5_internal_loop-asymmetric_AGUGGA-AGUGA, | −15 | 33 |
| | | | GCCAGGAGGCCAAAGCTGACTCCAGTG | −1->0_2-2_bulge-symmetric_GA-CG, 6_1- | | |
| | | | AGAACTCGGACACACAGCCTGAGTGAG | 1_mismatch_G-A, 8_1-1_mismatch_C-U,_15_3-3_bulge- | | |
| | | | CTGGGCTGGA | symmetric_AGU-UGA, 33_6-6_internal_loop- | | |
| | | | | symmetric_GAGUGA-AGUGAG | | |
| 42 | 0.92.62(−15, +33)+8(3/3) | 2812 | TGTGGTTGTTTTGCCGGCACCATAGTGA | −15_6-5_internal_loop-asymmetric_AGUGGA-AGUGA, | −15 | 33 |
| | | | GCCAGGAGGCCAAAGGTGTCTCCAGTG | −1->0_2-2_bulge-symmetric_GA-CG, 6_1- | | |
| | | | AGAACTCGGACACACAGCCTGAGTGAG | 1_mismatch_G-A, 8_1-1_mismatch_C-U,_16_3-3_bulge- | | |
| | | | CTGGGCTGGA | symmetric_GUG-GUG, 33_6-6_internal_loop- | | |
| | | | | symmetric_GAGUGA-AGUGAG | | |
| 42 | 0.92.62(−15, +33)+9(3/3) | 2813 | TGTGGTTGTTTTGCCGGCACCATAGTGA | −15_6-5_internal_loop-asymmetric_AGUGGA-AGUGA, | −15 | 33 |
| | | | GCCAGGAGGCCAAATTTCTCTCCAGTGA | −1->0_2-2_bulge-symmetric_GA-CG, 6_1- | | |
| | | | GAACTCGGACACACAGCCTGAGTGAGC | 1_mismatch_G-A, 8_1-1_mismatch_C-U,_17_3-3_bulge- | | |
| | | | TGGGCTGGA | symmetric_UGC-UUU, 33_6-6_internal_loop- | | |
| | | | | symmetric_GAGUGA-AGUGAG | | |
| 42 | 0.92.62(−15, +33)+10(3/3) | 2814 | TGTGGTTGTTTTGCCGGCACCATAGTGA | −15_6-5_internal_loop-asymmetric_AGUGGA-AGUGA, | −15 | 33 |
| | | | GCCAGGAGGCCAATTAACTCTCCAGTG | −1->0_2-2_bulge-symmetric_GA-CG, 6_1- | | |
| | | | AGAACTCGGACACACAGCCTGAGTGAG | 1_mismatch_G-A, 8_1-1_mismatch_C-U,_18_3-3_bulge- | | |
| | | | CTGGGCTGGA | symmetric_GCU-UUA, 33_6-6_internal_loop- | | |
| | | | | symmetric_GAGUGA-AGUGAG | | |
| 42 | 0.92.62(−15, +33)+11(3/3) | 2815 | TGTGGTTGTTTTGCCGGCACCATAGTGA | −15_6-5_internal_loop-asymmetric_AGUGGA-AGUGA, | −15 | 33 |
| | | | GCCAGGAGGCCATTCCACTCTCCAGTGA | −1->0_2-2_bulge-symmetric_GA-CG, 6_1- | | |
| | | | GAACTCGGACACACAGCCTGAGTGAGC | 1_mismatch_G-A, 8_1-1_mismatch_C-U,_19_3-3_bulge- | | |
| | | | TGGGCTGGA | symmetric_CUU-UUC, 33_6-6_internal_loop- | | |
| | | | | symmetric_GAGUGA-AGUGAG | | |
| 42 | 0.92.62(−15, +33)+12(3/3) | 2816 | TGTGGTTGTTTTGCCGGCACCATAGTGA | −15_6-5_internal_loop-asymmetric_AGUGGA-AGUGA, | −15 | 33 |
| | | | GCCAGGAGGCCTTTGCACTCTCCAGTGA | −1->0_2-2_bulge-symmetric_GA-CG, 6_1- | | |
| | | | GAACTCGGACACACAGCCTGAGTGAGC | 1_mismatch_G-A, 8_1-1_mismatch_C-U, 20_3-3_bulge- | | |
| | | | TGGGCTGGA | symmetric_UUU-UUU, 33_6-6_internal_loop- | | |
| | | | | symmetric_GAGUGA-AGUGAG | | |
| 42 | 0.92.62(−15, +33)+13(3/3) | 2817 | TGTGGTTGTTTTGCCGGCACCATAGTGA | −15_6-5_internal_loop-asymmetric_AGUGGA-AGUGA, | −15 | 33 |
| | | | GCCAGGAGGCGTTAGCACTCTCCAGTG | −1->0_2-2_bulge-symmetric_GA-CG, 6_1- | | |
| | | | AGAACTCGGACACACAGCCTGAGTGAG | 1_mismatch_G-A, 8_1-1_mismatch_C-U, 21_3-3_bulge- | | |
| | | | CTGGGCTGGA | symmetric_UUG-GUU, 33_6-6_internal_loop- | | |
| | | | | symmetric_GAGUGA-AGUGAG | | |
| 42 | 0.92.62(−15, +33)+14(3/3) | 2818 | TGTGGTTGTTTTGCCGGCACCATAGTGA | −15_6-5_internal_loop-asymmetric_AGUGGA-AGUGA, | −15 | 33 |
| | | | GCCAGGAGGATTAAGCACTCTCCAGTG | −1->0_2-2_bulge-symmetric_GA-CG, 6_1- | | |
| | | | AGAACTCGGACACACAGCCTGAGTGAG | 1_mismatch_G-A, 8_1-1_mismatch_C-U, 22_3-3_bulge- | | |
| | | | CTGGGCTGGA | symmetric_UGG-AUU, 33_6-6_internal_loop- | | |
| | | | | symmetric_GAGUGA-AGUGAG | | |
| 42 | 0.92.62(−15, +33)+15(3/3) | 2819 | TGTGGTTGTTTTGCCGGCACCATAGTGA | −15_6-5_internal_loop-asymmetric_AGUGGA-AGUGA, | −15 | 33 |
| | | | GCCAGGAGTAAAAAGCACTCTCCAGTG | −1->0_2-2_bulge-symmetric_GA-CG, 6_1- | | |
| | | | AGAACTCGGACACACAGCCTGAGTGAG | 1_mismatch_G-A, 8_1-1_mismatch_C-U, 23_3-3_bulge- | | |
| | | | CTGGGCTGGA | symmetric_GGC-UAA, 33_6-6_internal_loop- | | |
| | | | | symmetric_GAGUGA-AGUGAG | | |
| 42 | 0.92.62(−15, +33)+4(2/2) | 2820 | TGTGGTTGTTTTGCCGGCACCATAGTGA | −15_6-5_internal_loop-asymmetric_AGUGGA-AGUGA, | −15 | 33 |
| | | | GCCAGGAGGCCAAAGCACTCAGCAGTG | −1->0_2-2_bulge-symmetric_GA-CG, 6_1- | | |
| | | | AGAACTCGGACACACAGCCTGAGTGAG | 1_mismatch_G-A, 8_1-1_mismatch_C-U,_12_2-2_bulge- | | |
| | | | CTGGGCTGGA | symmetric_GA-AG, 33_6-6_internal_loop- | | |
| | | | | symmetric_GAGUGA-AGUGAG | | |
| 42 | 0.92.62(−15, +33)+5(2/2) | 2821 | TGTGGTTGTTTTGCCGGCACCATAGTGA | −15_6-5_internal_loop-asymmetric_AGUGGA-AGUGA, | −15 | 33 |
| | | | GCCAGGAGGCCAAAGCACTGACCAGTG | −1->0_2-2_bulge-symmetric_GA-CG, 6_1- | | |
| | | | AGAACTCGGACACACAGCCTGAGTGAG | 1_mismatch_G-A, 8_1-1_mismatch_C-U,_13_2-2_bulge- | | |
| | | | CTGGGCTGGA | symmetric_AG-GA, 33_6-6_internal_loop- | | |
| | | | | symmetric_GAGUGA-AGUGAG | | |
| 42 | 0.92.62(−15, +33)+6(2/2) | 2822 | TGTGGTTGTTTTGCCGGCACCATAGTGA | −15_6-5_internal_loop-asymmetric_AGUGGA-AGUGA, | −15 | 33 |
| | | | GCCAGGAGGCCAAAGCACAGTCCAGTG | −1->0_2-2_bulge-symmetric_GA-CG, 6_1- | | |
| | | | AGAACTCGGACACACAGCCTGAGTGAG | 1_mismatch_G-A, 8_1-1_mismatch_C-U,_14_2-2_bulge- | | |
| | | | CTGGGCTGGA | symmetric_GA-AG, 33_6-6_internal_loop- | | |
| | | | | symmetric_GAGUGA-AGUGAG | | |
| 42 | 0.92.62(−15, +33)+7(2/2) | 2823 | TGTGGTTGTTTTGCCGGCACCATAGTGA | −15_6-5_internal_loop-asymmetric_AGUGGA-AGUGA, | −15 | 33 |
| | | | GCCAGGAGGCCAAAGCAGACTCCAGTG | −1->0_2-2_bulge-symmetric_GA-CG, 6_1- | | |
| | | | AGAACTCGGACACACAGCCTGAGTGAG | 1_mismatch_G-A, 8_1-1_mismatch_C-U,_15_2-2_bulge- | | |
| | | | CTGGGCTGGA | symmetric_AG-GA, 33_6-6_internal_loop- | | |
| | | | | symmetric_GAGUGA-AGUGAG | | |
| 42 | 0.92.62(−15, +33)+8(2/2) | 2824 | TGTGGTTGTTTTGCCGGCACCATAGTGA | −15_6-5_internal_loop-asymmetric_AGUGGA-AGUGA, | −15 | 33 |
| | | | GCCAGGAGGCCAAAGCTGTCTCCAGTG | −1->0_2-2_bulge-symmetric_GA-CG, 6_1- | | |
| | | | AGAACTCGGACACACAGCCTGAGTGAG | 1_mismatch_G-A, 8_1-1_mismatch_C-U,_16_2-2_bulge- | | |
| | | | CTGGGCTGGA | symmetric_GU-UG, 33_6-6_internal_loop- | | |
| | | | | symmetric_GAGUGA-AGUGAG | | |
| 42 | 0.92.62(−15, +33)+9(2/2) | 2825 | TGTGGTTGTTTTGCCGGCACCATAGTGA | −15_6-5_internal_loop-asymmetric_AGUGGA-AGUGA, | −15 | 33 |
| | | | GCCAGGAGGCCAAAGATCTCTCCAGTG | −1->0_2-2_bulge-symmetric_GA-CG, 6_1- | | |
| | | | AGAACTCGGACACACAGCCTGAGTGAG | 1_mismatch_G-A, 8_1-1_mismatch_C-U,_17_2-2_bulge- | | |
| | | | CTGGGCTGGA | symmetric_UG-AU, 33_6-6_internal_loop- | | |
| | | | | symmetric_GAGUGA-AGUGAG | | |
| 42 | 0.92.62(−15, +33)+10(2/2) | 2826 | TGTGGTTGTTTTGCCGGCACCATAGTGA | −15_6-5_internal_loop-asymmetric_AGUGGA-AGUGA, | −15 | 33 |
| | | | GCCAGGAGGCCAAATAACTCTCCAGTG | −1->0_2-2_bulge-symmetric_GA-CG, 6_1- | | |
| | | | AGAACTCGGACACACAGCCTGAGTGAG | 1_mismatch_G-A, 8_1-1_mismatch_C-U,_18_2-2_bulge- | | |
| | | | CTGGGCTGGA | symmetric_GC-UA, 33_6-6_internal_loop- | | |
| | | | | symmetric_GAGUGA-AGUGAG | | |
| 42 | 0.92.62(−15, +33)+11(2/2) | 2827 | TGTGGTTGTTTTGCCGGCACCATAGTGA | −15_6-5_internal_loop-asymmetric_AGUGGA-AGUGA, | −15 | 33 |
| | | | GCCAGGAGGCCAATCCACTCTCCAGTG | −1->0_2-2_bulge-symmetric_GA-CG, 6_1- | | |
| | | | AGAACTCGGACACACAGCCTGAGTGAG | 1_mismatch_G-A, 8_1-1_mismatch_C-U,_19_2-2_bulge- | | |
| | | | CTGGGCTGGA | symmetric_CU-UC, 33_6-6_internal_loop- | | |
| | | | | symmetric_GAGUGA-AGUGAG | | |
| 42 | 0.92.62(−15, +33)+12(2/2) | 2828 | TGTGGTTGTTTTGCCGGCACCATAGTGA | −15_6-5_internal_loop-asymmetric_AGUGGA-AGUGA, | −15 | 33 |
| | | | GCCAGGAGGCCATTGCACTCTCCAGTGA | −1->0_2-2_bulge-symmetric_GA-CG, 6_1- | | |
| | | | GAACTCGGACACACAGCCTGAGTGAGC | 1_mismatch_G-A, 8_1-1_mismatch_C-U, 20_2-2_bulge- | | |
| | | | TGGGCTGGA | symmetric_UU-UU, 33_6-6_internal_loop- | | |
| | | | | symmetric_GAGUGA-AGUGAG | | |
| 42 | 0.92.62(−15, +33)+13(2/2) | 2829 | TGTGGTTGTTTTGCCGGCACCATAGTGA | −15_6-5_internal_loop-asymmetric_AGUGGA-AGUGA, | −15 | 33 |
| | | | GCCAGGAGGCCTTAGCACTCTCCAGTGA | −1->0_2-2_bulge-symmetric_GA-CG, 6_1- | | |
| | | | GAACTCGGACACACAGCCTGAGTGAGC | 1_mismatch_G-A, 8_1-1_mismatch_C-U, 21_2-2_bulge- | | |
| | | | TGGGCTGGA | symmetric_UU-UU, 33_6-6_internal_loop- | | |
| | | | | symmetric_GAGUGA-AGUGAG | | |
| 42 | 0.92.62(−15, +33)+14(2/2) | 2830 | TGTGGTTGTTTTGCCGGCACCATAGTGA | −15_6-5_internal_loop-asymmetric_AGUGGA-AGUGA, | −15 | 33 |
| | | | GCCAGGAGGTGTAAGCACTCTCCAGTG | −1->0_2-2_bulge-symmetric_GA-CG, 6_1- | | |
| | | | AGAACTCGGACACACAGCCTGAGTGAG | 1_mismatch_G-A, 8_1-1_mismatch_C-U, 22_2-2_bulge- | | |
| | | | CTGGGCTGGA | symmetric_UG-GU, 24_1-1_wobble G-U, 33_6- | | |
| | | | | 6_internal_loop-symmetric_GAGUGA-AGUGAG | | |
| 42 | 0.92.62(−15, +33)+15(2/2) | 2831 | TGTGGTTGTTTTGCCGGCACCATAGTGA | −15_6-5_internal_loop-asymmetric_AGUGGA-AGUGA, | −15 | 33 |
| | | | GCCAGGAGGAAAAAGCACTCTCCAGTG | −1->0_2-2_bulge-symmetric_GA-CG, 6_1- | | |
| | | | AGAACTCGGACACACAGCCTGAGTGAG | 1_mismatch_G-A, 8_1-1_mismatch_C-U, 23_2-2_bulge- | | |
| | | | CTGGGCTGGA | symmetric_GG-AA, 33_6-6_internal_loop- | | |
| | | | | symmetric_GAGUGA-AGUGAG | | |
| 42 | 0.92.62(−15, +33)+4(1/1) | 2832 | TGTGGTTGTTTTGCCGGCACCATAGTGA | −15_6-5_internal_loop-asymmetric_AGUGGA-AGUGA, | −15 | 33 |
| | | | GCCAGGAGGCCAAAGCACTCTGCAGTG | −1->0_2-2_bulge-symmetric_GA-CG, 6_1- | | |
| | | | AGAACTCGGACACACAGCCTGAGTGAG | 1_mismatch_G-A, 8_1-1_mismatch_C-U,_12_1- | | |
| | | | CTGGGCTGGA | 1_mismatch_G-G, 33_6-6_internal_loop- | | |
| | | | | symmetric_GAGUGA-AGUGAG | | |
| 42 | 0.92.62(−15, +33)+5(1/1) | 2833 | TGTGGTTGTTTTGCCGGCACCATAGTGA | −15_6-5_internal_loop-asymmetric_AGUGGA-AGUGA, | −15 | 33 |
| | | | GCCAGGAGGCCAAAGCACTCACCAGTG | −1->0_2-2_bulge-symmetric_GA-CG, 6_1- | | |
| | | | AGAACTCGGACACACAGCCTGAGTGAG | 1_mismatch_G-A, 8_1-1_mismatch_C-U,_13_1- | | |
| | | | CTGGGCTGGA | 1_mismatch_A-A, 33_6-6_internal_loop- | | |
| | | | | symmetric_GAGUGA-AGUGAG | | |
| 42 | 0.92.62(−15, +33)+6(1/1) | 2834 | TGTGGTTGTTTTGCCGGCACCATAGTGA | −15_6-5_internal_loop-asymmetric_AGUGGA-AGUGA, | −15 | 33 |
| | | | GCCAGGAGGCCAAAGCACTGTCCAGTG | −1->0_2-2_bulge-symmetric_GA-CG, 6_1- | | |
| | | | AGAACTCGGACACACAGCCTGAGTGAG | 1_mismatch_G-A, 8_1-1_mismatch_C-U,_14_1- | | |
| | | | CTGGGCTGGA | 1_mismatch_G-G, 33_6-6_internal_loop- | | |
| | | | | symmetric_GAGUGA-AGUGAG | | |
| 42 | 0.92.62(−15, +33)+7(1/1) | 2835 | TGTGGTTGTTTTGCCGGCACCATAGTGA | −15_6-5_internal_loop-asymmetric_AGUGGA-AGUGA, | −15 | 33 |
| | | | GCCAGGAGGCCAAAGCACACTCCAGTG | −1->0_2-2_bulge-symmetric_GA-CG, 6_1- | | |
| | | | AGAACTCGGACACACAGCCTGAGTGAG | 1_mismatch_G-A, 8_1-1_mismatch_C-U,_15_1- | | |
| | | | CTGGGCTGGA | 1_mismatch_A-A, 33_6-6_internal_loop- | | |
| | | | | symmetric_GAGUGA-AGUGAG | | |
| 42 | 0.92.62(−15, +33)+8(1/1) | 2836 | TGTGGTTGTTTTGCCGGCACCATAGTGA | −15_6-5_internal_loop-asymmetric_AGUGGA-AGUGA, | −15 | 33 |
| | | | GCCAGGAGGCCAAAGCAGTCTCCAGTG | −1->0_2-2_bulge-symmetric_GA-CG, 6_1- | | |
| | | | AGAACTCGGACACACAGCCTGAGTGAG | 1_mismatch_G-A, 8_1-1_mismatch_C-U,_16_1- | | |
| | | | CTGGGCTGGA | 1_mismatch_G-G, 33_6-6_internal_loop- | | |
| | | | | symmetric_GAGUGA-AGUGAG | | |
| 42 | 0.92.62(−15, +33)+9(1/1) | 2837 | TGTGGTTGTTTTGCCGGCACCATAGTGA | −15_6-5_internal_loop-asymmetric_AGUGGA-AGUGA, | −15 | 33 |
| | | | GCCAGGAGGCCAAAGTTCTCTCCAGTG | −1->0_2-2_bulge-symmetric_GA-CG, 6_1- | | |
| | | | AGAACTCGGACACACAGCCTGAGTGAG | 1_mismatch_G-A, 8_1-1_mismatch_C-U,_17_1- | | |
| | | | CTGGGCTGGA | 1_mismatch_U-U,_18_1-1_wobble_G-U, 33_6- | | |
| | | | | 6_internal_loop-symmetric_GAGUGA-AGUGAG | | |
| 42 | 0.92.62(−15, +33)+10(1/1) | 2838 | TGTGGTTGTTTTGCCGGCACCATAGTGA | −15_6-5_internal_loop-asymmetric_AGUGGA-AGUGA, | −15 | 33 |
| | | | GCCAGGAGGCCAAAGAACTCTCCAGTG | −1->0_2-2_bulge-symmetric_GA-CG, 6_1- | | |
| | | | AGAACTCGGACACACAGCCTGAGTGAG | 1_mismatch_G-A, 8_1-1_mismatch_C-U,_18_1- | | |
| | | | CTGGGCTGGA | 1_mismatch_G-A, 33_6-6_internal_loop- | | |
| | | | | symmetric_GAGUGA-AGUGAG | | |
| 42 | 0.92.62(−15, +33)+11(1/1) | 2839 | TGTGGTTGTTTTGCCGGCACCATAGTGA | −15_6-5_internal_loop-asymmetric_AGUGGA-AGUGA, | −15 | 33 |
| | | | GCCAGGAGGCCAAACCACTCTCCAGTG | −1->0_2-2_bulge-symmetric_GA-CG, 6_1- | | |
| | | | AGAACTCGGACACACAGCCTGAGTGAG | 1_mismatch_G-A, 8_1-1_mismatch_C-U,_19_1- | | |
| | | | CTGGGCTGGA | 1_mismatch_C-C, 33_6-6_internal_loop- | | |
| | | | | symmetric_GAGUGA-AGUGAG | | |
| 42 | 0.92.62(−15, +33)+12(1/1) | 2840 | TGTGGTTGTTTTGCCGGCACCATAGTGA | −15_6-5_internal_loop-asymmetric_AGUGGA-AGUGA, | −15 | 33 |
| | | | GCCAGGAGGCCAATGCACTCTCCAGTG | −1->0_2-2_bulge-symmetric_GA-CG, 6_1- | | |
| | | | AGAACTCGGACACACAGCCTGAGTGAG | 1_mismatch_G-A, 8_1-1_mismatch_C-U, 20_1- | | |
| | | | CTGGGCTGGA | 1_mismatch_U-U, 33_6-6_internal_loop- | | |
| | | | | symmetric_GAGUGA-AGUGAG | | |
| 42 | 0.92.62(−15, +33)+13(1/1) | 2841 | TGTGGTTGTTTTGCCGGCACCATAGTGA | −15_6-5_internal_loop-asymmetric_AGUGGA-AGUGA, | −15 | 33 |
| | | | GCCAGGAGGCCATAGCACTCTCCAGTG | −1->0_2-2_bulge-symmetric_GA-CG, 6_1- | | |
| | | | AGAACTCGGACACACAGCCTGAGTGAG | 1_mismatch_G-A, 8_1-1_mismatch_C-U, 21_1- | | |
| | | | CTGGGCTGGA | 1_mismatch_U-U, 33_6-6_internal_loop- | | |
| | | | | symmetric_GAGUGA-AGUGAG | | |
| 42 | 0.92.62(−15, +33)+14(1/1) | 2842 | TGTGGTTGTTTTGCCGGCACCATAGTGA | −15_6-5_internal_loop-asymmetric_AGUGGA-AGUGA, | −15 | 33 |
| | | | GCCAGGAGGTCTAAGCACTCTCCAGTG | −1->0_2-2_bulge-symmetric_GA-CG, 6_1- | | |
| | | | AGAACTCGGACACACAGCCTGAGTGAG | 1_mismatch_G-A, 8_1-1_mismatch_C-U, 22_1- | | |
| | | | CTGGGCTGGA | 1_mismatch_U-U, 24_1-1_wobble_G-U, 33_6- | | |
| | | | | 6_internal_loop-symmetric_GAGUGA-AGUGAG | | |
| 42 | 0.92.62(−15, +33)+15(1/1) | 2843 | TGTGGTTGTTTTGCCGGCACCATAGTGA | −15_6-5_internal_loop-asymmetric_AGUGGA-AGUGA, | −15 | 33 |
| | | | GCCAGGAGGCGAAAGCACTCTCCAGTG | −1->0_2-2_bulge-symmetric_GA-CG, 6_1- | | |
| | | | AGAACTCGGACACACAGCCTGAGTGAG | 1_mismatch_G-A, 8_1-1_mismatch_C-U, 23_1- | | |
| | | | CTGGGCTGGA | 1_mismatch_G-G, 33_6-6_internal_loop- | | |
| | | | | symmetric_GAGUGA-AGUGAG | | |

[0448] Symmetrical internal loops and symmetrical bulges (6/6, 5/5, 4/4,3/3, 2/2, 1/1) were inserted and tiled throughout the engineered guide RNA at single nucleotide resolution (scanning positions: 4 to 15) and the effect of each on percent editing was assessed in HEK293 cells. Most of the structural features located at position 15 eliminated +1 editing, especially the 4/4, 3/3 and 2/2 structural features, without severely affecting the on-target RNA editing efficiency. FIG. 41 depicts tiling of 6/6 symmetrical loops and 5/5 symmetrical internal loops in the guide-target ABCA4 RNA scaffold. As shown in FIG. 42, engineered guide RNAs were plotted based on their ability to facilitate on target adenosine editing against +1 editing efficiency. As shown in FIG. 42, engineered guide RNAs 0.92.62 (−15,+33) 15(2/2), 0.92.62 (−15,+33) 15(3/3), and 0.92.62 (−15,+33) 15(4/4), each identical with respect to micro-footprint and macro-footprint other than the size of the structural feature inserted at position 15 of the micro-footprint, displayed significant on-target adenosine editing while having less than 5% +1 editing.

[0449] Thus, this example demonstrates that local perturbation of the micro-footprint through insertion of bulges or internal loops can be used to minimize off target +1 editing in a candidate ABCA4 engineered guide RNA.

### Example 21

### In-Cell Editing Efficiencies for Machine Learning Derived LRRK2 Engineered Guide RNAs (−20, +26)

[0450] This example describes targeting the LRRK2 G2019S mutation for editing in vitro, in cells, using engineered guide RNAs of the present disclosure that were derived using multiple machine learning (ML) models, including an exhaustive ML model and a generative ML model. 750 ng of plasmid was transfected in cells (20,000 cells/well) of 68 cell line (LRRK2 cDNA minigene+ADAR1) and 219 cell line (LRRK2 cDNA minigene+ADAR1+2). 4 technical replicates were performed for each engineered guide RNA. Each engineered guide RNA tested contained a barbell macro-footprint of symmetrical internal loops with coordinates at −20 and +26 relative to the target A.

[0451] FIG. 44A-FIG. 44C provide a summary of the RNA editing efficiency of each LRRK2 engineered guide RNA tested via ADAR. The following LRRK2 engineered guide RNAs recited in TABLE 9 are utilized in the summary of RNA editing provided in FIG. 44A-FIG. 44C. Each engineered guide RNA sequence can also be represented as a DNA sequence in which each U is replaced with a T.

TABLE 9
LRRK2 ML Engineered Guide RNA Sequences

| SEQ | | Engineered | | Left | Right |
|---|---|---|---|---|---|
| ID | Guide | Guide RNA | | Barbell | Barbell |
| NO | Name | Sequence | Structural Features(target/guide) | Position | Position |
| 2686 | Ml_ | CCCUGGUGUG | −49_1-1_mismatch_C-A | −20 | 26 |
| | Exhaustive_ | CCCUCUGAUG | −20_6-6_internal_loop-symmetric_CAUCAU-UACUAC | | |
| | ADAR1_ | UUUUUUAGGG | −13_1-1_mismatch_G-A | | |
| | 0315 | GAUUCUACAG | −3_1-1_wobble_U-G | | |
| | | CAGGACUGAG | 1_1-1_wobble_G-U | | |
| | | CAAUCUUGUG | 2_1-1_mismatch_C-C | | |
| | | GUCAGCAAUA | 13_1-1_mismatch_A-G | | |
| | | UUUGCAUACU | 26_6-6_internal_loop-symmetric_GGGGAU-UAGGGG | | |
| | | ACGCAGCAUU | 34_1-1_wobble_G-U | | |
| | | GGGAUACAGU | | | |
| | | GUGAAAAGCA | | | |
| | | GCA | | | |
| 2687 | Ml_ | CCCUGGUGUG | −49_1-1_mismatch_C-A | −20 | 26 |
| | Exhaustive_ | CCCUCUGAUG | −20_6-6_internal_loop-symmetric_CAUCAU-UACUAC | | |
| | ADAR1_ | UUUUUUAGGG | −13_1-1_mismatch_G-A | | |
| | 0414 | GAUUCUACAG | −3_1-1_wobble_U-G | | |
| | | CAGGACUGAG | 0->1 2-2_bulge-symmetric_AG-GA | | |
| | | CAAUGGAGUG | 13_1-1_mismatch_A-G | | |
| | | GUCAGCAAUA | 26_6-6_internal_loop-symmetric_GGGGAU-UAGGGG | | |
| | | UUUGCAUACU | 34_1-1_wobble_G-U | | |
| | | ACGCAGCAUU | | | |
| | | GGGAUACAGU | | | |
| | | GUGAAAAGCA | | | |
| | | GCA | | | |
| 2688 | ML_ | CCCUGGUGUG | −49_1-1_mismatch_C-A | −20 | 26 |
| | Exhaustive_ | CCCUCUGAUG | −20_6-6_internal_loop-symmetric_CAUCAU-UACUAC | | |
| | ADAR2_ | UUUUUUAGGG | −10_1-1_mismatch_U-C | | |
| | 0313 | GAUUCUACAG | −1->0_2-2_bulge-symmetric_CA-GU | | |
| | | CACGACUGAG | 4_1-1_wobble_U-G | | |
| | | CAGUGCGUUA | 13_2-2_bulge-symmetric_AC-CG | | |
| | | GUCAGCCAUC | 26_6-6_internal_loop-symmetric_GGGGAU-UAGGGG | | |
| | | UUUGCAUACU | 34_1-1_wobble_G-U | | |
| | | ACGCAGCAUU | | | |
| | | GGGAUACAGU | | | |
| | | GUGAAAAGCA | | | |
| | | GCA | | | |
| 2689 | Ml_ | CCCUGGUGUG | −49_1-1_mismatch_C-A | −20 | 26 |
| | Exhaustive_ | CCCUCUGAUG | −20_6-6_internal_loop-symmetric_CAUCAU-UACUAC | | |
| | ADAR2_ | UUUUUUAGGG | −11_1-1_mismatch_U-C | | |
| | 0049 | GAUUCUACAG | −1->0_2-2_bulge-symmetric_CA-GU | | |
| | | CAUUACUCAG | 4_1-1_wobble_U-G | | |
| | | CAGUGCGUUA | 9_1-1_mismatch_C-C | | |
| | | GUCAGCACUC | 14_1-1_mismatch_C-U | | |
| | | UUUGCAUACU | 26_6-6_internal_loop-symmetric_GGGGAU-UAGGGG | | |
| | | ACGCAGCAUU | 34_1-1_wobble_G-U | | |
| | | GGGAUACAGU | | | |
| | | GUGAAAAGCA | | | |
| | | GCA | | | |
| 2690 | Ml_ | CCCUGGUGUG | −49_1-1_mismatch_C-A | −20 | 26 |
| | Exhaustive_ | CCCUCUGAUG | −20_6-6_internal_loop-symmetric_CAUCAU-UACUAC | | |
| | ADAR2_ | UUUUUUAGGG | −7_1-1_wobble U-G | | |
| | 0069 | GAUUCUACAG | −1->0_2-2_bulge-symmetric_CA-GU | | |
| | | CACGACUGAG | 4_1-1_wobble U-G | | |
| | | CAGUGCGCUA | 13_2-2_bulge-symmetric_AC-CG | | |
| | | GUCGGCAAUC | 26_6-6_internal_loop-symmetric_GGGGAU-UAGGGG | | |
| | | UUUGCAUACU | 34_1-1 wobble_G-U | | |
| | | ACGCAGCAUU | | | |
| | | GGGAUACAGU | | | |
| | | GUGAAAAGCA | | | |
| | | GCA | | | |
| 2691 | ML_ | CCCUGGUGUG | −49_1-1_mismatch_C-A | −20 | 26 |
| | Exhaustive_ | CCCUCUGAUG | −20_6-6_internal_loop-symmetric_CAUCAU-UACUAC | | |
| | ADAR2_ | UUUUUUAGGG | −2->0_3-3_bulge-symmetric_ACA-GUG | | |
| | 0090 | GAUUCUACAG | 4_1-1_wobble_U-G | | |
| | | CAAUACUCAG | 9_1-1_mismatch_C-C | | |
| | | CAGUGCGUGA | 14_1-1_mismatch_C-A | | |
| | | GUCAGCAAUC | 26_6-6_internal_loop-symmetric_GGGGAU-UAGGGG | | |
| | | UUUGCAUACU | 34_1-1_wobble_G-U | | |
| | | ACGCAGCAUU | | | |
| | | GGGAUACAGU | | | |
| | | GUGAAAAGCA | | | |
| | | GCA | | | |
| 2692 | Ml_ | CCCUGGUGUG | −49_1-1_mismatch_C-A | −20 | 26 |
| | Exhaustive_ | CCCUCUGAUG | −20_6-6_internal_loop-symmetric_CAUCAU-UACUAC | | |
| | ADAR2_ | UUUUUUAGGG | −7_1-1_wobble_U-G | | |
| | 0139 | GAUUCUACAG | −1->0_2-2_bulge-symmetric_CA-GC | | |
| | | CACGACUGAG | 4_1-1 wobble_U-G | | |
| | | CAGUGCGCUA | 13_2-2_bulge-symmetric_AC-CG | | |
| | | GUCGGCAAUC | 26_6-6_internal_loop-symmetric_GGGGAU-UAGGGG | | |
| | | UUUGCAUACU | 34_1-1_wobble_G-U | | |
| | | ACGCAGCAUU | | | |
| | | GGGAUACAGU | | | |
| | | GUGAAAAGCA | | | |
| | | GCA | | | |
| 2693 | Ml_ | CCCUGGUGUG | −49_1-1_mismatch_C-A | −20 | 26 |
| | Exhaustive_ | CCCUCUGAUG | −20_6-6_internal_loop-symmetric_CAUCAU-UACUAC | | |
| | ADAR2_ | UUUUUUAGGG | −13_1-1_mismatch_G-A | | |
| | 0395 | GAUUCUACAG | −1->0_2-2_bulge-symmetric_CA-GC | | |
| | | CACGACUGAG | 4_1-1_wobble_U-G | | |
| | | CAGUGCGCUA | 13_2-2_bulge-symmetric_AC-CG | | |
| | | GUCAGCAAUA | 26_6-6_internal_loop-symmetric_GGGGAU-UAGGGG | | |
| | | UUUGCAUACU | 34_1-1_wobble_G-U | | |
| | | ACGCAGCAUU | | | |
| | | GGGAUACAGU | | | |
| | | GUGAAAAGCA | | | |
| | | GCA | | | |
| 2694 | Ml_ | CCCUGGUGUG | −49_1-1_mismatch_C-A | −20 | 26 |
| | Exhaustive_ | CCCUCUGAUG | −20_6-6_internal_loop-symmetric_CAUCAU-UACUAC | | |
| | ADAR2_ | UUUUUUAGGG | −10_1-1_mismatch_U-C | | |
| | 0453 | GAUUCUACAG | −1->0_2-2_bulge-symmetric_CA-GC | | |
| | | CAAUACUCAG | 4_1-1_wobble_U-G | | |
| | | CAGUGCGCUA | 9_1-1_mismatch_C-C | | |
| | | GUCAGCCAUC | 14_1-1_mismatch_C-A | | |
| | | UUUGCAUACU | 26_6-6_internal_loop-symmetric_GGGGAU-UAGGGG | | |
| | | ACGCAGCAUU | 34_1-1_wobble_G-U | | |
| | | GGGAUACAGU | | | |
| | | GUGAAAAGCA | | | |
| | | GCA | | | |
| 2695 | Ml_ | CCCUGGUGUG | −49_1-1_mismatch_C-A | −20 | 26 |
| | Exhaustive_ | CCCUCUGAUG | −20_6-6_internal_loop-symmetric_CAUCAU-UACUAC | | |
| | ADAR12_ | UUUUUUAGGG | −7_1-1_wobble_U-G | | |
| | 0464 | GAUUCUACAG | 0_1-1_mismatch_A-C | | |
| | | CAUGACUGAG | 2_1-1_mismatch_C-C | | |
| | | CAGUCCCGUA | 4_1-1_wobble_U-G | | |
| | | GUCGGCAAUC | 13_2-2_bulge-symmetric_AC-UG | | |
| | | UUUGCAUACU | 26_6-6_internal_loop-symmetric_GGGGAU-UAGGGG | | |
| | | ACGCAGCAUU | 34_1-1_wobble_G-U | | |
| | | GGGAUACAGU | | | |
| | | GUGAAAAGCA | | | |
| | | GCA | | | |
| 2696 | Ml_ | CCCUGGUGUG | −49_1-1_mismatch_C-A | −20 | 26 |
| | Exhaustive_ | CCCUCUGAUG | −20_6-6_internal_loop-symmetric_CAUCAU-UACUAC | | |
| | ADAR12_ | UUUUUUAGGG | −13_1-1_mismatch_G-A | | |
| | 1042 | GAUUCUACAG | 0_1-1_mismatch_A-C | | |
| | | CAAUACUCAG | 2_1-1_mismatch_C-U | | |
| | | CAGUUCCGUA | 4_1-1_wobble U-G | | |
| | | GUCAGCAAUA | 9_1-1_mismatch_C-C | | |
| | | UUUGCAUACU | 14_1-1_mismatch_C-A | | |
| | | ACGCAGCAUU | 26_6-6_internal_loop-symmetric_GGGGAU-UAGGGG | | |
| | | GGGAUACAGU | 34_1-1_wobble_G-U | | |
| | | GUGAAAAGCA | | | |
| | | GCA | | | |
| 2697 | ML_ | CCCUGGUGUG | −49_1-1_mismatch_C-A | −20 | 26 |
| | Exhaustive_ | CCCUCUGAUG | −20_6-6_internal_loop-symmetric_CAUCAU-UACUAC | | |
| | ADAR12_ | UUUUUUAGGG | −13_1-1_mismatch_G-A | | |
| | 104 | GAUUCUACAG | 0_1-1_mismatch_A-C | | |
| | | CAUUACUCAG | 2_1-1_mismatch_C-C | | |
| | | CAGUCCCGUA | 4_1-1_wobble_U-G | | |
| | | GUCAGCAAUA | 9_1-1_mismatch_C-C | | |
| | | UUUGCAUACU | 14_1-1_mismatch_C-U | | |
| | | ACGCAGCAUU | 26_6-6_internal_loop-symmetric_GGGGAU-UAGGGG | | |
| | | GGGAUACAGU | 34_1-1_wobble_G-U | | |
| | | GUGAAAAGCA | | | |
| | | GCA | | | |
| 2698 | Ml_ | CCCUGGUGUG | −49_1-1_mismatch_C-A | −20 | 26 |
| | Exhaustive_ | CCCUCUGAUG | −20 6-6_internal_loop-symmetric_CAUCAU-UACUAC | | |
| | ADAR12_ | UUUUUUAGGG | −9_1-1_mismatch_G-A | | |
| | 1540 | GAUUCUACAG | 0_1-1_mismatch_A-C | | |
| | | CAUUACUCAG | 2_2-2_bulge-symmetric_CA-AU | | |
| | | CAAAUCCGUA | 9_1-1_mismatch_C-C | | |
| | | GUCAGAAAUC | 14_1-1_mismatch_C-U | | |
| | | UUUGCAUACU | 26_6-6_internal_loop-symmetric_GGGGAU-UAGGGG | | |
| | | ACGCAGCAUU | 34_1-1_wobble_G-U | | |
| | | GGGAUACAGU | | | |
| | | GUGAAAAGCA | | | |
| | | GCA | | | |
| 2699 | Ml_ | CCCUGGUGUG | −49_1-1_mismatch_C-A | −20 | 26 |
| | Generative_ | CCCUCUGAUG | −20_6-6_internal_loop-symmetric_CAUCAU-UACUAC | | |
| | 0002 | UUUUUUAGGG | −10_1-1_mismatch_U-C | | |
| | | GAUUCUAGAG | −7_1-1_wobble_U-G | | |
| | | AGGUACUGUG | −3_1-1_wobble_U-G | | |
| | | CCAUCCCGUG | 0_1-1_mismatch_A-C | | |
| | | GUCGGCCAUC | 2_1-1_mismatch_C-C | | |
| | | UUUGCAUACU | 5_1-1_mismatch_U-C | | |
| | | ACGCAGCAUU | 8_1-1_mismatch_U-U | | |
| | | GGGAUACAGU | 15_1-1_wobble_U-G | | |
| | | GUGAAAAGCA | 16_1-1_mismatch_G-A | | |
| | | GCA | 19_1-1_mismatch_G-G | | |
| | | | 26_6-6_internal_loop-symmetric_GGGGAU-UAGGGG | | |
| | | | 34_1-1_wobble_G-U | | |
| 2700 | Ml_ | CCCUGGUGUG | −49_1-1_mismatch_C-A | −20 | 26 |
| | Generative_ | CCCUCUGAUG | −20 6-6_internal_loop-symmetric_CAUCAU-UACUAC | | |
| | 0013 | UUUUUUAGGG | −7_1-1_wobble_U-G | | |
| | | GAUUCUAGAG | −3_1-1_wobble_U-G | | |
| | | CAGGACGGUG | 0_1-1_mismatch_A-C | | |
| | | CAGUCCCGUG | 2_1-1_mismatch_C-C | | |
| | | GUCGGCAAUC | 4_1-1_wobble_U-G | | |
| | | UUUGCAUACU | 8_1-1_mismatch_U-U | | |
| | | ACGCAGCAUU | 10_1-1_mismatch_A-G | | |
| | | GGGAUACAGU | 13_1-1_mismatch_A-G | | |
| | | GUGAAAAGCA | 19_1-1_mismatch_G-G | | |
| | | GCA | 26_6-6_internal_loop-symmetric_GGGGAU-UAGGGG | | |
| | | | 34_1-1_wobble_G-U | | |
| 2701 | Ml_ | CCCUGGUGUG | −49_1-1_mismatch_C-A | −20 | 26 |
| | Generative_ | CCCUCUGAUG | −20 6-6_internal_loop-symmetric_CAUCAU-UACUAC | | |
| | 0016 | UUUUUUAGGG | −10_2-2_bulge-symmetric_UU-CU | | |
| | | GAUUCUACAG | −8_1-1_mismatch_C-C | | |
| | | GAGGACUGGG | −7_1-1_wobble_U-G | | |
| | | CAGUCCCGUG | −3_1-1_wobble_U-G | | |
| | | GUCGCCCUUC | 0_1-1_mismatch_A-C | | |
| | | UUUGCAUACU | 2_1-1_mismatch_C-C | | |
| | | ACGCAGCAUU | 4_1-1_wobble U-G | | |
| | | GGGAUACAGU | 8_1-1_wobble U-G | | |
| | | GUGAAAAGCA | 13_1-1_mismatch_A-G | | |
| | | GCA | 16_1-1_mismatch_G-G | | |
| | | | 26_6-6_internal_loop-symmetric_GGGGAU-UAGGGG | | |
| | | | 34_1-1_wobble_G-U | | |
| 2702 | Ml_ | CCCUGGUGUG | −49_1-1_mismatch_C-A | −20 | 26 |
| | Generative_ | CCCUCUGAUG | −20_6-6_internal_loop-symmetric_CAUCAU-UACUAC | | |
| | 0043 | UUUUUUAGGG | −10_1-1_mismatch_U-C | | |
| | | GAUUCUACAG | −9_1-1_wobble_G-U | | |
| | | CGGUACUGUG | −7_1-1_wobble U-G | | |
| | | CAAAUCCGUG | −3_1-1_wobble_U-G | | |
| | | GUCGGUCAUC | 0_1-1_mismatch_A-C | | |
| | | UUUGCAUACU | 2_2-2_bulge-symmetric_CA-AU | | |
| | | ACGCAGCAUU | 8_1-1_mismatch_U-U | | |
| | | GGGAUACAGU | 15_1-1_wobble_U-G | | |
| | | GUGAAAAGCA | 26_6-6_internal_loop-symmetric_GGGGAU-UAGGGG | | |
| | | GCA | 34_1-1_wobble_G-U | | |
| 2703 | Ml_ | CCCUGGUGUG | −49_1-1_mismatch_C-A | −20 | 26 |
| | Generative_ | CCCUCUGAUG | −20_6-6_internal_loop-symmetric_CAUCAU-UACUAC | | |
| | 0058 | UUUUUUAGGG | −10_1-1_mismatch_U-C | | |
| | | GAUUCUACGG | −7_1-1_wobble_U-G | | |
| | | CAGGACUGGG | −3_1-1_wobble U-G | | |
| | | GAAAUCCGUG | 0_1-1_mismatch_A-C | | |
| | | GUCGGCCAUC | 2_2-2_bulge-symmetric_CA-AU | | |
| | | UUUGCAUACU | 6_1-1_mismatch_G-G | | |
| | | ACGCAGCAUU | 8_1-1_wobble_U-G | | |
| | | GGGAUACAGU | 13_1-1_mismatch_A-G | | |
| | | GUGAAAAGCA | 18_1-1_wobble_U-G | | |
| | | GCA | 26_6-6_internal_loop-symmetric_GGGGAU-UAGGGG | | |
| | | | 34_1-1_wobble_G-U | | |
| 2704 | Ml_ | CCCUGGUGUG | −49_1-1_mismatch_C-A | −20 | 26 |
| | Generative_ | CCCUCUGAUG | −20 6-6_internal_loop-symmetric_CAUCAU-UACUAC | | |
| | 0071 | UUUUUUAGGG | −10_1-1_mismatch_U-C | | |
| | | GAUUCUACAG | −8_1-1_mismatch_C-U | | |
| | | CGGUACUGCG | −7_1-1_wobble_U-G | | |
| | | CAGUCCCGUG | −6_1-1_mismatch_G-G | | |
| | | GUGGUCCAUC | −3_1 _wobble_U-G | | |
| | | UUUGCAUACU | 0_1-1_mismatch_A-C | | |
| | | ACGCAGCAUU | 2_1-1_mismatch_C-C | | |
| | | GGGAUACAGU | 4_1-1_wobble_U-G | | |
| | | GUGAAAAGCA | 8_1-1_mismatch_U-C | | |
| | | GCA | 15_1-1_wobble_U-G | | |
| | | | 26_6-6_internal_loop-symmetric_GGGGAU-UAGGGG | | |
| | | | 34_1-1_wobble_G-U | | |
| 2705 | Ml_ | CCCUGGUGUG | −49_1-1_mismatch_C-A | −20 | 26 |
| | Generative_ | CCCUCUGAUG | −20 6-6_internal_loop-symmetric_CAUCAU-UACUAC | | |
| | 0130 | UUUUUUAGGG | −7_1-1_wobble_U-G | | |
| | | GAUUCUAUAG | −3_1-1_wobble_U-G | | |
| | | CAGGAAUGAG | 0_1-1_mismatch_A-C | | |
| | | GAAAUCCGUG | 2_2-2_bulge-symmetric_CA-AU | | |
| | | GUCGGCAAUC | 6_1-1_mismatch_G-G | | |
| | | UUUGCAUACU | 11_3-3_bulge-symmetric_GUA-GAA | | |
| | | ACGCAGCAUU | 19_1-1_wobble_G-U | | |
| | | GGGAUACAGU | 26_6-6_internal_loop-symmetric_GGGGAU-UAGGGG | | |
| | | GUGAAAAGCA | 34_1-1 wobble_G-U | | |
| | | GCA | | | |
| 2706 | Ml_ | CCCUGGUGUG | −49_1-1_mismatch_C-A | −20 | 26 |
| | Generative_ | CCCUCUGAUG | −20 6-6_internal_loop-symmetric_CAUCAU-UACUAC | | |
| | 0156 | UUUUUUAGGG | −9_2-2_bulge-symmetric_UG-AU | | |
| | | GAUUCUACAG | −7_1-1_wobble_U-G | | |
| | | CAGUACUCAG | −3_1-1_wobble_U-G | | |
| | | GAAAUCCGUG | 0_1-1_mismatch_A-C | | |
| | | GUCGGAUAUC | 2_2-2_bulge-symmetric_CA-AU | | |
| | | UUUGCAUACU | 6_1-1_mismatch_G-G | | |
| | | ACGCAGCAUU | 9_1-1_mismatch_C-C | | |
| | | GGGAUACAGU | 26_6-6_internal_loop-symmetric_GGGGAU-UAGGGG | | |
| | | GUGAAAAGCA | 34_1-1_wobble G-U | | |
| | | GCA | | | |
| 2707 | Ml_ | CCCUGGUGUG | −49_1-1_mismatch_C-A | −20 | 26 |
| | Generative_ | CCCUCUGAUG | −20_6-6_internal_loop-symmetric_CAUCAU-UACUAC | | |
| | 0176 | UUUUUUAGGG | −7_1-1_wobble_U-G | | |
| | | GAUUCUAAAG | −3_1-1_wobble_U-G | | |
| | | CAGGAGUGAG | 0->3_4-4_bulge-symmetric_AGCA-AUCC | | |
| | | CAGAUCCGUG | 4_1-1_wobble_U-G | | |
| | | GUCGGCAAUC | 11_1-1_mismatch_G-G | | |
| | | UUUGCAUACU | 13_1-1_mismatch_A-G | | |
| | | ACGCAGCAUU | 19_1-1_mismatch_G-A | | |
| | | GGGAUACAGU | 26_6-6_internal_loop-symmetric_GGGGAU-UAGGGG | | |
| | | GUGAAAAGCA | 34_1-1_wobble_G-U | | |
| | | GCA | | | |
| 2708 | Ml_ | CCCUGGUGUG | −49_1-1_mismatch_C-A | −20 | 26 |
| | Generative_ | CCCUCUGAUG | −20 6-6_internal_loop-symmetric_CAUCAU-UACUAC | | |
| | 0218 | UUUUUUAGGG | −8_2-2_bulge-symmetric_GC-UA | | |
| | | GAUUCUACAG | −3_1-1_wobble_U-G | | |
| | | GUGUACUGUG | 0_1-1_mismatch_A-C | | |
| | | AAAUCCCGUG | 2_1-1_mismatch_C-C | | |
| | | GUCAUAAAUC | 6_1-1_mismatch_G-A | | |
| | | UUUGCAUACU | 8_1-1_mismatch_U-U | | |
| | | ACGCAGCAUU | 15_2-2_bulge-symmetric_UG-GU | | |
| | | GGGAUACAGU | 26_6-6_internal_loop-symmetric_GGGGAU-UAGGGG | | |
| | | GUGAAAAGCA | 34_1-1_wobble_G-U | | |
| | | GCA | | | |
| 2709 | Ml_ | CCCUGGUGUG | −49_1-1_mismatch_C-A | −20 | 26 |
| | Generative_ | CCCUCUGAUG | −20 6-6_internal_loop-symmetric_CAUCAU-UACUAC | | |
| | 0274 | UUUUUUAGGG | −8 2-2_bulge-symmetric_GC-UA | | |
| | | GAUUCUACAG | −7_1-1_wobble U-G | | |
| | | CAGUACUGUC | −3_1-1_wobble_U-G | | |
| | | CAGUCCCGUG | 0_1-1_mismatch_A-C | | |
| | | GUCGUAAAUC | 2_1-1_mismatch_C-C | | |
| | | UUUGCAUACU | 4_1-1_wobble_U-G | | |
| | | ACGCAGCAUU | 7 2-2_bulge-symmetric_CU-UC | | |
| | | GGGAUACAGU | 26_6-6_internal_loop-symmetric_GGGGAU-UAGGGG | | |
| | | GUGAAAAGCA | 34_1-1_wobble_G-U | | |
| | | GCA | | | |
| 2710 | ML_ | CCCUGGUGUG | −49_1-1_mismatch_C-A | −20 | 26 |
| | Generative_ | CCCUCUGAUG | −20_6-6_internal_loop-symmetric_CAUCAU-UACUAC | | |
| | 0325 | UUUUUUAGGG | −10_1-1_mismatch_U-U | | |
| | | GAUUCUACAU | −7_1-1_wobble U-G | | |
| | | CAGGACUGAG | −3_1-1_wobble_U-G | | |
| | | CUUUUCCGAG | −2->5_8-8_internal_loop-symmetric_ACAGCAUU- | | |
| | | GUCGGCUAUC | UUUUCCGA | | |
| | | UUUGCAUACU | 13_1-1_mismatch_A-G | | |
| | | ACGCAGCAUU | 17_1-1_mismatch_C-U | | |
| | | GGGAUACAGU | 26_6-6_internal_loop-symmetric_GGGGAU-UAGGGG | | |
| | | GUGAAAAGCA | 34_1-1_wobble G-U | | |
| | | GCA | | | |
| 2711 | Ml_ | CCCUGGUGUG | −49_1-1_mismatch_C-A | −20 | 26 |
| | Generative_ | CCCUCUGAUG | −20 6-6_internal_loop-symmetric_CAUCAU-UACUAC | | |
| | 0332 | UUUUUUAGGG | −7_1-1_wobble_U-G | | |
| | | GAUUCUACAU | 0_1-1_mismatch_A-C | | |
| | | CAGUACUGGG | 2_1-1_mismatch_C-U | | |
| | | CAGUUCCGUA | 4_1-1_wobble U-G | | |
| | | GUCGGCAAUC | 8_1-1_wobble_U-G | | |
| | | UUUGCAUACU | 17_1-1_mismatch_C-U | | |
| | | ACGCAGCAUU | 26_6-6_internal_loop-symmetric_GGGGAU-UAGGGG | | |
| | | GGGAUACAGU | 34_1-1 wobble_G-U | | |
| | | GUGAAAAGCA | | | |
| | | GCA | | | |
| 2712 | Ml_ | CCCUGGUGUG | −49_1-1_mismatch_C-A | −20 | 26 |
| | Generative_ | CCCUCUGAUG | −20_6-6_internal_loop-symmetric_CAUCAU-UACUAC | | |
| | 0559 | UUUUUUAGGG | −11_1-1_mismatch_U-C | | |
| | | GAUUCUACAG | −7_1-1_wobble_U-G | | |
| | | CAGUACUGGG | −1->0_2-2_bulge-symmetric_CA-GC | | |
| | | CAGUGCGCUA | 4_1-1_wobble_U-G | | |
| | | GUCGGCACUC | 8_1-1_wobble U-G | | |
| | | UUUGCAUACU | 26_6-6_internal_loop-symmetric_GGGGAU-UAGGGG | | |
| | | ACGCAGCAUU | 34_1-1_wobble G-U | | |
| | | GGGAUACAGU | | | |
| | | GUGAAAAGCA | | | |
| | | GCA | | | |
| 2713 | ML_ | CCCUGGUGUG | −49_1-1_mismatch_C-A | −20 | 26 |
| | Generative_ | CCCUCUGAUG | −20_6-6_internal_loop-symmetric_CAUCAU-UACUAC | | |
| | 0639 | UUUUUUAGGG | −6_1-1_mismatch_G-A | | |
| | | GAUUCUACAG | −3->2 6-6_internal_loop-symmetric_UACAGC- | | |
| | | CAAUACUCAC | CCCGAU | | |
| | | CAGUCCCGAU | 4_1-1_wobble U-G | | |
| | | GUAAGCAAUC | 7_3-3_bulge-symmetric_CUC-CAC | | |
| | | UUUGCAUACU | 14_1-1_mismatch_C-A | | |
| | | ACGCAGCAUU | 26_6-6_internal_loop-symmetric_GGGGAU-UAGGGG | | |
| | | GGGAUACAGU | 34_1-1_wobble_G-U | | |
| | | GUGAAAAGCA | | | |
| | | GCA | | | |
| 2714 | Ml_ | CCCUGGUGUG | −49_1-1_mismatch_C-A | −20 | 26 |
| | Generative_ | CCCUCUGAUG | −20_6-6_internal_loop-symmetric_CAUCAU-UACUAC | | |
| | 0643 | UUUUUUAGGG | −7_1-1_wobble_U-G | | |
| | | GAUUCUACGG | −3->6_10-10_internal_loop- | | |
| | | CAGUACUGUG | symmetric_UACAGCAUUG-AAAUCCCGAU | | |
| | | AAAUCCCGAU | 8_1-1_mismatch_U-U | | |
| | | GUCGGCAAUC | 18_1-1 wobble_U-G | | |
| | | UUUGCAUACU | 26_6-6_internal_loop-symmetric_GGGGAU-UAGGGG | | |
| | | ACGCAGCAUU | 34_1-1 wobble_G-U | | |
| | | GGGAUACAGU | | | |
| | | GUGAAAAGCA | | | |
| | | GCA | | | |
| 2715 | Ml_ | CCCUGGUGUG | −49_1-1_mismatch_C-A | −20 | 26 |
| | Generative_ | CCCUCUGAUG | −20_6-6_internal_loop-symmetric_CAUCAU-UACUAC | | |
| | 0644 | UUUUUUAGGG | −7_0-1_bulge-asymmetric_-G | | |
| | | GAUUCUACCG | −6_1-1_wobble_G-U | | |
| | | CAGGACGGAG | −2->5_8-7_internal_loop-asymmetric_ACAGCAUU- | | |
| | | CUAUCCCGAG | UAUCCCG | | |
| | | UUAGGCAAUC | 10_1-1_mismatch_A-G | | |
| | | UUUGCAUACU | 13_1-1_mismatch_A-G | | |
| | | ACGCAGCAUU | 18_1-1_mismatch_U-C | | |
| | | GGGAUACAGU | 26_6-6_internal_loop-symmetric_GGGGAU-UAGGGG | | |
| | | GUGAAAAGCA | 34_1-1 wobble_G-U | | |
| | | GCA | | | |
| 2716 | Ml_ | CCCUGGUGUG | −49_1-1_mismatch_C-A | −20 | 26 |
| | Generative_ | CCCUCUGAUG | −20_6-6_internal_loop-symmetric_CAUCAU-UACUAC | | |
| | 0690 | UUUUUUAGGG | −14_2-2_bulge-symmetric_AA-GA | | |
| | | GAUUCUACGG | −9_4-4_bulge-symmetric_AUUG-ACCC | | |
| | | CAUGACUGAU | −7_1-1_wobble_U-G | | |
| | | CAGUCCCGUG | −3_1-1_wobble_U-G | | |
| | | GUCGGACCCC | 0_1-1_mismatch_A-C | | |
| | | GAUGCAUACU | 2_1-1_mismatch_C-C | | |
| | | ACGCAGCAUU | 4_1-1_wobble_U-G | | |
| | | GGGAUACAGU | 7_1-1_mismatch_C-U | | |
| | | GUGAAAAGCA | 13_2-2_bulge-symmetric_AC-UG | | |
| | | GCA | 18_1-1_wobble_U-G | | |
| | | | 26_6-6_internal_loop-symmetric_GGGGAU-UAGGGG | | |
| | | | 34_1-1_wobble_G-U | | |
| 2717 | Ml_ | CCCUGGUGUG | −49_1-1_mismatch_C-A | −20 | 26 |
| | Generative_ | CCCUCUGAUG | −20 6-6_internal_loop-symmetric_CAUCAU-UACUAC | | |
| | 0699 | UUUUUUAGGG | −9 7-7_internal_loop-symmetric_AAGAUUG- | | |
| | | GAUUCUACGG | ACCCCCG | | |
| | | CAAGACUGGG | −7_1-1_wobble_U-G | | |
| | | CAGUCCCGUG | −3_1-1_wobble_U-G | | |
| | | GUCGGACCCC | 0_1-1_mismatch_A-C | | |
| | | CGUGCAUACU | 2_1-1_mismatch_C-C | | |
| | | ACGCAGCAUU | 4_1-1_wobble_U-G | | |
| | | GGGAUACAGU | 8_1-1_wobble_U-G | | |
| | | GUGAAAAGCA | 13_2-2_bulge-symmetric_AC-AG | | |
| | | GCA | 18_1-1_wobble_U-G | | |
| | | | 26_6-6_internal_loop-symmetric_GGGGAU-UAGGGG | | |
| | | | 34_1-1_wobble_G-U | | |
| 2718 | Ml_ | CCCUGGUGUG | −49_1-1_mismatch_C-A | −20 | 26 |
| | Generative_ | CCCUCUGAUG | −20_6-6_internal_loop-symmetric_CAUCAU-UACUAC | | |
| | 0701 | UUUUUUAGGG | −14_2-2_bulge-symmetric_AA-CG | | |
| | | GAUUCUACGG | −9_3-3_bulge-symmetric_UUG-ACC | | |
| | | CAGGACUGGG | −7_1-1_wobble_U-G | | |
| | | CUUUCCCGUG | −3_1-1_wobble_U-G | | |
| | | GUCGGACCUC | 0_1-1_mismatch_A-C | | |
| | | CGUGCAUACU | 2_1-1_mismatch_C-C | | |
| | | ACGCAGCAUU | 4_2-2_bulge-symmetric_UU-UU | | |
| | | GGGAUACAGU | 8_1-1_wobble U-G | | |
| | | GUGAAAAGCA | 13_1-1_mismatch_A-G | | |
| | | GCA | 18_1-1_wobble_U-G | | |
| | | | 26_6-6_internal_loop-symmetric_GGGGAU-UAGGGG | | |
| | | | 34_1-1_wobble_G-U | | |
| 2719 | Ml_ | CCCUGGUGUG | −49_1-1_mismatch_C-A | −20 | |
| | Generative_ | CCCUCUGAUG | −20_6-6_internal_loop-symmetric_CAUCAU-UACUAC | | |
| | 0703 | UUUUUUAGGG | | | |
| | | GAUUCUACGG | | | |
| | | UAGGACUGAU | | | |
| | | CAGUCCCGUG | | | |
| | | GUCGAACCAC | | | |
| | | GUUGCAUACU | | | |
| | | ACGCAGCAUU | | | |
| | | GGGAUACAGU | | | |
| | | GUGAAAAGCA | | | |
| | | GCA | | | |
| 2720 | Ml_ | CCCUGGUGUG | −49_1-1_mismatch_C-A | −20 | 26 |
| | Generative_ | CCCUCUGAUG | −20 6-6_internal_loop-symmetric_CAUCAU-UACUAC | | |
| | 0719 | UUUUUUAGGG | −6_9-9_internal_loop-symmetric_AGAUUGCUG- | | |
| | | GAUUCUACGG | GGAACCCCG | | |
| | | CAAGACUGAG | −3_1-1_wobble_U-G | | |
| | | CAGUCCCGUG | 0_1-1_mismatch_A-C | | |
| | | GUGGAACCCC | 2_1-1_mismatch_C-C | | |
| | | GUUGCAUACU | 4_1-1_wobble_U-G | | |
| | | ACGCAGCAUU | 13_2-2_bulge-symmetric_AC-AG | | |
| | | GGGAUACAGU | 18_1-1_wobble_U-G | | |
| | | GUGAAAAGCA | 26_6-6_internal_loop-symmetric_GGGGAU-UAGGGG | | |
| | | GCA | 34_1-1_wobble_G-U | | |
| 2721 | Ml_ | CCCUGGUGUG | −49_1-1_mismatch_C-A | −20 | 26 |
| | Generative_ | CCCUCUGAUG | −20 6-6_internal_loop-symmetric_CAUCAU-UACUAC | | |
| | 0728 | UUUUUUAGGG | −11 4-5_internal_loop-asymmetric_AGAU-CCCCG | | |
| | | GAUCCUACGG | −7_1-1_wobble_U-G | | |
| | | CAGUACUGAU | −6_1-0_bulge-asymmetric_G- | | |
| | | CAAAUCCGUG | −3_1-1_wobble_U-G | | |
| | | GUGGCACCCC | 0_1-1_mismatch_A-C | | |
| | | GUUGCAUACU | 2_2-2_bulge-symmetric_CA-AU | | |
| | | ACGCAGCAUU | 7_1-1_mismatch_C-U | | |
| | | GGGAUACAGU | 18_1-1_wobble_U-G | | |
| | | GUGAAAAGCA | 23_1-1_mismatch_A-C | | |
| | | GCA | 26_6-6_internal_loop-symmetric_GGGGAU-UAGGGG | | |
| | | | 34_1-1_wobble_G-U | | |
| 2722 | Ml_ | CCCUGGUGUG | −49_1-1_mismatch_C-A | −20 | 26 |
| | Generative_ | CCCUCUGAUG | −20_6-6_internal_loop-symmetric_CAUCAU-UACUAC | | |
| | 0732 | UUUUUUAGGG | −14_2-2_bulge-symmetric_AA-CG | | |
| | | GAUUCUACAG | −11_1-2_bulge-asymmetric_U-CC | | |
| | | CAGGACUGAC | −7_1-1_wobble_U-G | | |
| | | CAGUUCCGUG | −6_1-0_bulge-asymmetric_G- | | |
| | | GUGGCACCUC | −3_1-1_wobble_U-G | | |
| | | CGUGCAUACU | 0_1-1_mismatch_A-C | | |
| | | ACGCAGCAUU | 2_1-1_mismatch_C-U | | |
| | | GGGAUACAGU | 4_1-1_wobble_U-G | | |
| | | GUGAAAAGCA | 7_1-1_mismatch_C-C | | |
| | | GCA | 13_1-1_mismatch_A-G | | |
| | | | 26_6-6_internal_loop-symmetric_GGGGAU-UAGGGG | | |
| | | | 34_1-1_wobble_G-U | | |
| 2723 | Ml_ | CCCUGGUGUG | −49_1-1_mismatch_C-A | −20 | 26 |
| | Generative_ | CCCUCUGAUG | −20 6-6_internal_loop-symmetric_CAUCAU-UACUAC | | |
| | 0733 | UUUUUUAGGG | −11 4-5_internal_loop-asymmetric_AGAU-CCCCG | | |
| | | GAUUCUACGG | −7_1-1 wobble_U-G | | |
| | | CAGUACUGAG | −6_1-0_bulge-asymmetric_G- | | |
| | | AAAUCCCGUG | −3_1-1_wobble_U-G | | |
| | | GUGGCACCCC | 0_1-1_mismatch_A-C | | |
| | | GUUGCAUACU | 2_1-1_mismatch_C-C | | |
| | | ACGCAGCAUU | 6_1-1_mismatch_G-A | | |
| | | GGGAUACAGU | 18_1-1_wobble_U-G | | |
| | | GUGAAAAGCA | 26_6-6_internal_loop-symmetric_GGGGAU-UAGGGG | | |
| | | GCA | 34_1-1_wobble_G-U | | |
| 2724 | Ml_ | CCCUGGUGUG | −49_1-1_mismatch_C-A | −20 | 26 |
| | Generative_ | CCCUCUGAUG | −20_6-6_internal_loop-symmetric_CAUCAU-UACUAC | | |
| | 0742 | UUUUUUAGGG | −14_2-2_bulge-symmetric_AA-CG | | |
| | | GAUUCUACAG | −11_1-2_bulge-asymmetric_U-CC | | |
| | | CAGUCCUGAC | −9_1-1_wobble_G-U | | |
| | | CAGUCCCGUG | −7_1-0_bulge-asymmetric_U- | | |
| | | GUCGUACCUC | −3_1-1_wobble_U-G | | |
| | | CGUGCAUACU | 0_1-1_mismatch_A-C | | |
| | | ACGCAGCAUU | 2_1-1_mismatch_C-C | | |
| | | GGGAUACAGU | 4_1-1_wobble U-G | | |
| | | GUGAAAAGCA | 7_1-1_mismatch_C-C | | |
| | | GCA | 12_1-1_mismatch_U-C | | |
| | | | 26_6-6_internal_loop-symmetric_GGGGAU-UAGGGG | | |
| | | | 34_1-1_wobble_G-U | | |
| 2725 | Ml_ | CCCUGGUGUG | −49_1-1_mismatch_C-A | −20 | |
| | Generative_ | CCCUCUGAUG | −20_6-6_internal_loop-symmetric_CAUCAU-UACUAC | | |
| | 0743 | UUUUUUAGGG | | | |
| | | GCUUCUACAG | | | |
| | | CAGGACUGAU | | | |
| | | CAAAUCCGUG | | | |
| | | GUGGAACCCC | | | |
| | | GUUGCAUACU | | | |
| | | ACGCAGCAUU | | | |
| | | GGGAUACAGU | | | |
| | | GUGAAAAGCA | | | |
| | | GCA | | | |
| 2726 | Ml_ | CCCUGGUGUG | −49_1-1_mismatch_C-A | | |
| | Generative_ | CCCUCUGAUG | | | |
| | 0745 | UUUUUUAGGG | | | |
| | | GAUUCUACGG | | | |
| | | CAGUACUGAG | | | |
| | | ACAUCCCGUG | | | |
| | | GUGGCACCCC | | | |
| | | CGUGCAUACU | | | |
| | | ACGCAGCAUU | | | |
| | | GGGAUACAGU | | | |
| | | GUGAAAAGCA | | | |
| | | GCA | | | |
| 2727 | Ml_ | CCCUGGUGUG | −49_1-1_mismatch_C-A | −20 | 26 |
| | Generative_ | CCCUCUGAUG | −20 6-6_internal_loop-symmetric_CAUCAU-UACUAC | | |
| | 0766 | UUUUUUAGGG | −8_1-1_mismatch_C-U | | |
| | | GAUUCUACCG | −7_1-1_wobble_U-G | | |
| | | CAGUACUCAC | −3_1-0_bulge-asymmetric_U- | | |
| | | CAGUCGCCGU | 0_1-1_mismatch_A-C | | |
| | | GUCGUCAAUC | 2_0-1_bulge-asymmetric_-C | | |
| | | UUUGCAUACU | 4_1-1_wobble_U-G | | |
| | | ACGCAGCAUU | 7_3-3_bulge-symmetric_CUC-CAC | | |
| | | GGGAUACAGU | 18_1-1_mismatch_U-C | | |
| | | GUGAAAAGCA | 26_6-6_internal_loop-symmetric_GGGGAU-UAGGGG | | |
| | | GCA | 34_1-1_wobble_G-U | | |
| 2728 | Ml_ | CCCUGGUGUG | −49_1-1_mismatch_C-A | −20 | 26 |
| | Generative_ | CCCUCUGAUG | −20 6-6_internal_loop-symmetric_CAUCAU-UACUAC | | |
| | 0769 | UUUUUUAGGG | −7_1-1_wobble_U-G | | |
| | | GAUUCUACCG | −3_1-0_bulge-asymmetric_U- | | |
| | | CAGUACUCAC | 0_1-1_mismatch_A-C | | |
| | | CAGUCGCCGU | 2_0-1_bulge-asymmetric_-C | | |
| | | GUCGGCAAUC | 4_1-1_wobble_U-G | | |
| | | UUUGCAUACU | 7_3-3_bulge-symmetric_CUC-CAC | | |
| | | ACGCAGCAUU | 18_1-1_mismatch_U-C | | |
| | | GGGAUACAGU | 26_6-6_internal_loop-symmetric_GGGGAU-UAGGGG | | |
| | | GUGAAAAGCA | 34_1-1 wobble_G-U | | |
| | | GCA | | | |

[0452] The sequences for the engineered guides used as comparators in FIG. 44A-FIG. 44C is provided below in TABLE 10. While the engineered guide RNA sequences in TABLE 10 are provided as DNA sequences with a T substituted for each U, the corresponding RNA sequences are also encompassed herein.

TABLE 10
Comparator LRRK2 Engineered Guide RNA Sequences

| SEQ | | | | Left | Right |
|---|---|---|---|---|---|
| ID | | | Structural Features | Barbell | Barbell |
| NO | Guide Name | Sequence | (target/guide) | Position | Position |
| 2844 | A-C 0.113.57 | CCCTGGTGTGCCCTCT | −20_6-6_internal_loop- | −20 | 26 |
| | (−20, +26) | GATGTTTTTTAGGGG | symmetric_CAUCAU- | | |
| | | ATTCTACAGCAGTAC | UACUAC, 0_1-1_ | | |
| | | TGAGCAATGCCGTAG | mismatch_A-C, 26_6-6_ | | |
| | | TCAGCAATCTTTGCA | internal_loop- | | |
| | | TACTACGCAGCATTG | symmetric_GGGGAU- | | |
| | | GGATACAGTGTGAAA | UAGGGG | | |
| | | AGCAGCA | | | |
| 2845 | 1976 | CCCTGGTGTGCCCTCT | −20_6-6_internal_loop- | −20 | 26 |
| | 0.113.57 | GATGTTTTTTAGGGG | symmetric_CAUCAU- | | |
| | (−20, 26) | ATTCTACAACAGTAC | UACUAC, -8_1- | | |
| | | TGAGCTATCCCGAAT | 1_mismatch_C-A, −4- | | |
| | | TCAACAATCTTTGCA | >5_10-10_internal_loop- | | |
| | | TACTACGCAGCATTG | symmetric_CUACAGCAUU- | | |
| | | GGATACAGTGTGAAA | UAUCCCGAAU, 17_1- | | |
| | | AGCAGCA | 1_mismatch_C-A, 26_6- | | |
| | | | 6_internal_loop- | | |
| | | | symmetric_GGGGAU- | | |
| | | | UAGGGG | | |
| 2846 | 610 0.113.57 | CCCTGGTGTGCCCTCT | −20_6-6_internal_loop- | −20 | 26 |
| | (−20, 26) | GATGTTTTTTAGGGG | symmetric_CAUCAU- | | |
| | | ATTCTACATCTGTAGT | UACUAC, −4_1- | | |
| | | GAGCAATTCCGTGCT | 1_mismatch_C-C, −3_1- | | |
| | | CAGCAATCTTTGCAT | 1_wobble_U-G, 0_1- | | |
| | | ACTACGCAGCATTGG | 1_mismatch_A-C, 2_1- | | |
| | | GATACAGTGTGAAAA | 1_mismatch_C-U, 11_1- | | |
| | | GCAGCA | 1_mismatch_G-G, 15_1- | | |
| | | | 1_mismatch_U-U, 17_1- | | |
| | | | 1_mismatch_C-U, 26_6- | | |
| | | | 6_internal_loop- | | |
| | | | symmetric_GGGGAU- | | |
| | | | UAGGGG | | |

[0453] FIG. 45-FIG. 70 show the editing efficiency of each engineered guide RNA via either ADAR1-only or ADAR1+ADAR2. Engineered guide RNAs that facilitated superior editing via ADAR1 and ADAR1+ADAR2 were selected for further engineering. The following LRRK2 engineered guide RNAs recited in TABLE 11 correspond to the editing efficiency plots provided in FIG. 45-FIG. 70. While the engineered guide RNA sequences in TABLE 11 are provided as DNA sequences with a T substituted for each U, the corresponding RNA sequences are also encompassed herein.

TABLE 11
LRRK2 Engineered Guide RNA Sequences Utilized in Example 21

| SEQ | | | | | Left | Right |
|---|---|---|---|---|---|---|
| ID | | | | | Barbell | Barbell |
| NO | FIG. | Guide Name | Sequence | Structural Features (target/guide) | Position | Position |
| 2847 | 45 | A-C 0.113.57 | CCCTGGTGTGCCCTCTGATGTTTTTT | −20_6-6_internal_loop-symmetric_CAUCAU- | −20 | 26 |
| | | (−20, +26) | AGGGGATTCTACAGCAGTACTGAGC | UACUAC, 0_1-1_mismatch_A-C, 26_6- | | |
| | | | AATGCCGTAGTCAGCAATCTTTGCA | 6_internal_loop-symmetric_GGGGAU-UAGGGG | | |
| | | | TACTACGCAGCATTGGGATACAGTG | | | |
| | | | TGAAAAGCAGCA | | | |
| 2848 | 45 | 919 0.113.57 | CCCTGGTGTGCCCTCTGATGTTTTTT | −20_6-6_internal_loop-symmetric_CAUCAU- | −20 | 25 |
| | | (−20, +26) | AGGGGCTTCTACAGCAGTTCGGAGG | UACUAC, −3_1-1_wobble_U-G, −2_1- | | |
| | | | AATCCCGAGGTCAGCAATCTTTGCA | 1_mismatch_A-A, 0_1-1_mismatch_A-C, 2_1- | | |
| | | | TACTACGCAGCATTGGGATACAGTG | 1_mismatch_C-C, 6_1-1_mismatch_G-G, 10_3- | | |
| | | | TGAAAAGCAGCA | 3_bulge-symmetric_AGU-UCG, 25_7- | | |
| | | | | 7_internal_loop-symmetric_UGGGGAU- | | |
| | | | | UAGGGGC | | |
| 2849 | 46 | 1976 0.113.57 | CCCTGGTGTGCCCTCTGATGTTTTTT | −20_6-6_internal_loop-symmetric_CAUCAU- | −20 | 26 |
| | | (−20, +26) | AGGGGATTCTACAACAGTACTGAGC | UACUAC, −8_1-1_mismatch_C-A, −4→5_10- | | |
| | | | TATCCCGAATTCAACAATCTTTGCA | 10_internal_loop-symmetric_CUACAGCAUU- | | |
| | | | TACTACGCAGCATTGGGATACAGTG | UAUCCCGAAU, 17_1-1_mismatch_C-A, 26−6- | | |
| | | | TGAAAAGCAGCA | 6_internal_loop-symmetric_GGGGAU-UAGGGG | | |
| 2850 | 46 | 2397 0.113.57 | CCCTGGTGTGCCCTCTGATGTTTTTT | | −20 | 26 |
| | | (−20, +26) | AGGGGATTCTACCGCTGTGCTGGGC | | | |
| | | | AATCCCGTGGTCAGCAATCTTTGCA | | | |
| | | | TACTACGCAGCATTGGGATACAGTG | | | |
| | | | TGAAAAGCAGCA | | | |
| 2851 | 47 | 871 0.113.57 | CCCTGGTGTGCCCTCTGATGTTTTTT | −20_6-6_internal_loop-symmetric_CAUCAU- | −20 | 26 |
| | | (−20, +26) | AGGGGATTCTACAGTAGGACTGAGC | UACUAC, −7_1-1_wobble_U-G, −6_1- | | |
| | | | ACTGCCGAGCTGGGCAATCTTTGCA | 1_mismatch_G-G, −4_0-1_bulge-asymmetric_-C, | | |
| | | | TACTACGCAGCATTGGGATACAGTG | −2_1-0_bulge-asymmetric_A-, 0_1-1_mismatch_A- | | |
| | | | TGAAAAGCAGCA | C, 4_1-1_mismatch_U-C, 13_1-1_mismatch_A-G, | | |
| | | | | 16_1-1_wobble_G-U, 26_6-6_internal_loop- | | |
| | | | | symmetric_GGGGAU-UAGGGG | | |
| 2852 | 47 | 610 0.113.57 | CCCTGGTGTGCCCTCTGATGTTTTTT | −20_6-6_internal_loop-symmetric_CAUCAU- | −20 | 26 |
| | | (−20, +26) | AGGGGATTCTACATCTGTAGTGAGC | UACUAC, −4_1-1_mismatch_C-C, −3_1- | | |
| | | | AATTCCGTGCTCAGCAATCTTTGCA | 1_wobble_U-G, 0_1-1_mismatch_A-C, 2_1- | | |
| | | | TACTACGCAGCATTGGGATACAGTG | 1_mismatch_C-U, 11_1-1_mismatch_G-G, 15_1- | | |
| | | | TGAAAAGCAGCA | 1_mismatch_U-U, 17_1-1_mismatch_C-U, 26_6- | | |
| | | | | 6_internal_loop-symmetric_GGGGAU-UAGGGG | | |
| 2853 | 48 | ML generative | CCCTGGTGTGCCCTCTGATGTTTTTT | −20_6-6_internal_loop-symmetric_CAUCAU- | −20 | |
| | | 0703 | AGGGGATTCTACGGTAGGACTGATC | UACUAC | | |
| | | (−20, +26) | AGTCCCGTGGTCGAACCACGTTGCA | | | |
| | | | TACTACGCAGCATTGGGATACAGTG | | | |
| | | | TGAAAAGCAGCA | | | |
| 2854 | 48 | ML generative 0719 | CCCTGGTGTGCCCTCTGATGTTTTTT | −20_6-6_internal_loop-symmetric_CAUCAU- | −20 | 26 |
| | | (−20, +26) | AGGGGATTCTACGGCAAGACTGAGC | UACUAC, −6_9-9_internal_loop- | | |
| | | | AGTCCCGTGGTGGAACCCCGTTGCA | symmetric_AGAUUGCUG-GGAACCCCG, −3_1- | | |
| | | | TACTACGCAGCATTGGGATACAGTG | 1_wobble_U-G, 0_1-1_mismatch_A-C, 2_1- | | |
| | | | TGAAAAGCAGCA | 1_mismatch_C-C, 4_1-1_wobble U-G, 13_2- | | |
| | | | | 2_bulge-symmetric_AC-AG, 18_1-1_wobble_U-G, | | |
| | | | | 26_6-6_internal_loop-symmetric_GGGGAU- | | |
| | | | | UAGGGG | | |
| 2855 | 49 | ML generative 0728 | CCCTGGTGTGCCCTCTGATGTTTTTT | −20_6-6_internal_loop-symmetric_CAUCAU- | −20 | 26 |
| | | (−20, +26) | AGGGGATCCTACGGCAGTACTGATC | UACUAC, −11_4-5_internal_loop- | | |
| | | | AAATCCGTGGTGGCACCCCGTTGCA | asymmetric_AGAU-CCCCG, −7_1-1_wobble_U-G, | | |
| | | | TACTACGCAGCATTGGGATACAGTG | −6_1-0_bulge-asymmetric_G-, −3_1-1_wobble_U- | | |
| | | | TGAAAAGCAGCA | G, 0_1-1_mismatch_A-C, 2_2-2_bulge- | | |
| | | | | symmetric_CA-AU, 7_1-1_mismatch_C-U, 18_1- | | |
| | | | | 1_wobble_U-G, 23_1-1_mismatch_A-C, 26_6- | | |
| | | | | 6_internal_loop-symmetric_GGGGAU-UAGGGG | | |
| 2856 | 49 | ML generative 0732 | CCCTGGTGTGCCCTCTGATGTTTTTT | −20_6-6_internal_loop-symmetric_CAUCAU- | −20 | 26 |
| | | (−20, +26) | AGGGGATTCTACAGCAGGACTGACC | UACUAC, −14_2-2_bulge-symmetric_AA-CG, | | |
| | | | AGTTCCGTGGTGGCACCTCCGTGCA | −11_1-2_bulge-asymmetric_U-CC, -7_1- | | |
| | | | TACTACGCAGCATTGGGATACAGTG | 1_wobble_U-G, −6_1-0_bulge-asymmetric_G-, | | |
| | | | TGAAAAGCAGCA | −3_1-1_wobble_U-G, 0_1-1_mismatch_A-C, 2_1- | | |
| | | | | 1_mismatch_C-U, 4_1-1_wobble_U-G, 7_1- | | |
| | | | | 1_mismatch_C-C, 13_1-1_mismatch_A-G, 26_6- | | |
| | | | | 6_internal_loop-symmetric_GGGGAU-UAGGGG | | |
| 2857 | 50 | ML_generative_0733 | CCCTGGTGTGCCCTCTGATGTTTTTT | −20_6-6_internal_loop-symmetric_CAUCAU- | −20 | 26 |
| | | (−20, +26) | AGGGGATTCTACGGCAGTACTGAGA | UACUAC, −11_4-5_internal_loop- | | |
| | | | AATCCCGTGGTGGCACCCCGTTGCA | asymmetric_AGAU-CCCCG, −7_1-1_wobble_U-G, | | |
| | | | TACTACGCAGCATTGGGATACAGTG | −6_1-0_bulge-asymmetric_G-, −3_1-1_wobble_U- | | |
| | | | TGAAAAGCAGCA | G, 0_1-1_mismatch_A-C, 2_1-1_mismatch_C-C, | | |
| | | | | 6_1-1_mismatch_G-A, 18_1-1_wobble_U-G, 26_6- | | |
| | | | | 6_internal_loop-symmetric_GGGGAU-UAGGGG | | |
| 2858 | 50 | ML_generative_0742 | CCCTGGTGTGCCCTCTGATGTTTTTT | −20_6-6_internal_loop-symmetric_CAUCAU- | −20 | 26 |
| | | (−20, +26) | AGGGGATTCTACAGCAGTCCTGACC | UACUAC, −14_2-2_bulge-symmetric_AA-CG, | | |
| | | | AGTCCCGTGGTCGTACCTCCGTGCA | −11_1-2_bulge-asymmetric_U-CC, −9_1- | | |
| | | | TACTACGCAGCATTGGGATACAGTG | 1_wobble_G-U, −7_1-0_bulge-asymmetric_U-, | | |
| | | | TGAAAAGCAGCA | −3_1-1_wobble_U-G, 0_1-1_mismatch_A-C, 2_1- | | |
| | | | | 1_mismatch_C-C, 4_1-1_wobble_U-G, 7_1- | | |
| | | | | 1_mismatch_C-C, 12_1-1_mismatch_U-C, 26_6- | | |
| | | | | 6_internal_loop-symmetric_GGGGAU-UAGGGG | | |
| 2859 | 51 | ML_generative_0743 | CCCTGGTGTGCCCTCTGATGTTTTTT | −20_6-6_internal_loop-symmetric_CAUCAU- | −20 | |
| | | (−20, +26) | AGGGGCTTCTACAGCAGGACTGATC | UACUAC | | |
| | | | AAATCCGTGGTGGAACCCCGTTGCA | | | |
| | | | TACTACGCAGCATTGGGATACAGTG | | | |
| | | | TGAAAAGCAGCA | | | |
| 2860 | 51 | ML_generative_0745 | CCCTGGTGTGCCCTCTGATGTTTTTT | | | |
| | | (−20, +26) | AGGGGATTCTACGGCAGTACTGAGA | | | |
| | | | CATCCCGTGGTGGCACCCCCGTGCA | | | |
| | | | TACTACGCAGCATTGGGATACAGTG | | | |
| | | | TGAAAAGCAGCA | | | |
| 2861 | 52 | ML_generative_0766 | CCCTGGTGTGCCCTCTGATGTTTTTT | −20_6-6_internal_loop-symmetric_CAUCAU- | −20 | 26 |
| | 53 | (−20, +26) | AGGGGATTCTACCGCAGTACTCACC | UACUAC, −8_1-1_mismatch_C-U, −7_1- | | |
| | | | AGTCGCCGTGTCGTCAATCTTTGCA | 1_wobble_U-G, −3_1-0_bulge-asymmetric_U-, | | |
| | | | TACTACGCAGCATTGGGATACAGTG | 0_1-1_mismatch_A-C, 2_0-1_bulge-asymmetric_- | | |
| | | | TGAAAAGCAGCA | C, 4_1-1_wobble_U-G, 7_3-3_bulge- | | |
| | | | | symmetric_CUC-CAC, 18_1-1_mismatch_U-C, | | |
| | | | | 26_6-6_internal_loop-symmetric_GGGGAU- | | |
| | | | | UAGGGG | | |
| 2862 | 52 | ML_generative_0769 | CCCTGGTGTGCCCTCTGATGTTTTTT | −20_6-6_internal_loop-symmetric_CAUCAU- | −20 | 26 |
| | 53 | (−20, +26) | AGGGGATTCTACCGCAGTACTCACC | UACUAC, −7_1-1_wobble_U-G, −3_1-0_bulge- | | |
| | | | AGTCGCCGTGTCGGCAATCTTTGCA | asymmetric_U-, 0_1-1_mismatch_A-C, 2_0- | | |
| | | | TACTACGCAGCATTGGGATACAGTG | 1_bulge-asymmetric_-C, 4_1-1_wobble_U-G, 7_3- | | |
| | | | TGAAAAGCAGCA | 3_bulge-symmetric_CUC-CAC, 18_1- | | |
| | | | | 1_mismatch_U-C, 26_6-6_internal_loop- | | |
| | | | | symmetric_GGGGAU-UAGGGG | | |
| 2863 | 54 | ML_exhaustive_ADA | CCCTGGTGTGCCCTCTGATGTTTTTT | −20_6-6_internal_loop-symmetric_CAUCAU- | −20 | 26 |
| | 73 | R2_0049 (−20, +26) | AGGGGATTCTACAGCATTACTCAGC | UACUAC, −11_1-1_mismatch_U-C, −1→0_2- | | |
| | | | AGTGCGTTAGTCAGCACTCTTTGCA | 2_bulge-symmetric_CA-GU, 4_1-1_wobble_U-G, | | |
| | | | TACTACGCAGCATTGGGATACAGTG | 9_1-1_mismatch_C-C, 14_1-1_mismatch_C-U, | | |
| | | | TGAAAAGCAGCA | 26_6-6_internal_loop-symmetric_GGGGAU- | | |
| | | | | UAGGGG | | |
| 2864 | 54 | ML_exhaustive_ADA | CCCTGGTGTGCCCTCTGATGTTTTTT | −20_6-6_internal_loop-symmetric_CAUCAU- | −20 | 26 |
| | 73 | R2_0069 (−20, +26) | AGGGGATTCTACAGCACGACTGAGC | UACUAC, −7_1-1_wobble_U-G, −1→0_2-2_bulge- | | |
| | | | AGTGCGTTAGTCGGCAATCTTTGCA | symmetric_CA-GU, 4_1-1_wobble U-G, 13_2- | | |
| | | | TACTACGCAGCATTGGGATACAGTG | 2_bulge-symmetric_AC-CG, 26_6-6_internal_loop- | | |
| | | | TGAAAAGCAGCA | symmetric_GGGGAU-UAGGGG | | |
| 2865 | 55 | ML_exhaustive_ADA | CCCTGGTGTGCCCTCTGATGTTTTTT | −20_6-6_internal_loop-symmetric_CAUCAU- | −20 | 26 |
| | 73 | R2_0090 (−20, +26) | AGGGGATTCTACAGCAATACTCAGC | UACUAC, −2→0_3-3_bulge-symmetric_ACA- | | |
| | | | AGTGCGTGAGTCAGCAATCTTTGCA | GUG, 4_1-1_wobble_U-G, 9_1-1_mismatch_C-C, | | |
| | | | TACTACGCAGCATTGGGATACAGTG | 14_1-1_mismatch_C-A, 26_6-6_internal_loop- | | |
| | | | TGAAAAGCAGCA | symmetric_GGGGAU-UAGGGG | | |
| 2866 | 55 | ML exhaustive_ADA | CCCTGGTGTGCCCTCTGATGTTTTTT | −20_6-6_internal_loop-symmetric_CAUCAU- | −20 | 26 |
| | 73 | R2_0139 (−20, +26) | AGGGGATTCTACAGCACGACTGAGC | UACUAC, −7_1-1_wobble_U-G, −1→0_2-2_bulge- | | |
| | | | AGTGCGCTAGTCGGCAATCTTTGCA | symmetric_CA-GC, 4_1-1_wobble_U-G, 13_2- | | |
| | | | TACTACGCAGCATTGGGATACAGTG | 2_bulge-symmetric_AC-CG, 26_6-6_internal_loop- | | |
| | | | TGAAAAGCAGCA | symmetric_GGGGAU-UAGGGG | | |
| 2867 | 56 | ML_generative_0274 | CCCTGGTGTGCCCTCTGATGTTTTTT | −20_6-6_internal_loop-symmetric_CAUCAU- | −20 | 26 |
| | | (−20, +26) | AGGGGATTCTACAGCAGTACTGTCC | UACUAC, −8_2-2_bulge-symmetric_GC-UA, | | |
| | | | AGTCCCGTGGTCGTAAATCTTTGCA | −7_1-1_wobble_U-G, −3_1-1_wobble_U-G, 0_1- | | |
| | | | TACTACGCAGCATTGGGATACAGTG | 1_mismatch_A-C, 2_1-1_mismatch_C-C, 4_1- | | |
| | | | TGAAAAGCAGCA | 1_wobble_U-G, 7_2-2_bulge-symmetric_CU-UC, | | |
| | | | | 26_6-6_internal_loop-symmetric_GGGGAU- | | |
| | | | | UAGGGG | | |
| 2868 | 56 | ML_generative_0325 | CCCTGGTGTGCCCTCTGATGTTTTTT | −20_6-6_internal_loop-symmetric_CAUCAU- | −20 | 26 |
| | | (−20, +26) | AGGGGATTCTACATCAGGACTGAGC | UACUAC, −10_1-1_mismatch_U-U, −7_1- | | |
| | | | TTTTCCGAGGTCGGCTATCTTTGCAT | 1_wobble_U-G, −3_1-1_wobble_U-G, −2→5_8- | | |
| | | | ACTACGCAGCATTGGGATACAGTGT | 8_internal_loop-symmetric_ACAGCAUU- | | |
| | | | GAAAAGCAGCA | UUUUCCGA, 13_1-1_mismatch_A-G, 17_1- | | |
| | | | | 1_mismatch_C-U, 26_6-6_internal_loop- | | |
| | | | | symmetric_GGGGAU-UAGGGG | | |
| 2869 | 57 | ML_generative_0332 | CCCTGGTGTGCCCTCTGATGTTTTTT | −20_6-6_internal_loop-symmetric_CAUCAU- | −20 | 26 |
| | | (−20, +26) | AGGGGATTCTACATCAGTACTGGGC | UACUAC, −7_1-1_wobble_U-G, 0_1- | | |
| | | | AGTTCCGTAGTCGGCAATCTTTGCA | 1_mismatch_A-C, 2_1-1_mismatch_C-U, 4_1- | | |
| | | | TACTACGCAGCATTGGGATACAGTG | 1_wobble_U-G, 8_1-1_wobble_U-G, 17_1- | | |
| | | | TGAAAAGCAGCA | 1_mismatch_C-U, 26_6-6_internal_loop- | | |
| | | | | symmetric_GGGGAU-UAGGGG | | |
| 2870 | 57 | ML_generative_0559 | CCCTGGTGTGCCCTCTGATGTTTTTT | −20_6-6_internal_loop-symmetric_CAUCAU- | −20 | 26 |
| | | (−20, +26) | AGGGGATTCTACAGCAGTACTGGGC | UACUAC, −11_1-1_mismatch_U-C, −7_1- | | |
| | | | AGTGCGCTAGTCGGCACTCTTTGCA | 1_wobble_U-G, −1→0_2-2_bulge-symmetric_CA- | | |
| | | | TACTACGCAGCATTGGGATACAGTG | GC, 4_1-1_wobble_U-G, 8_1-1_wobble_U-G, | | |
| | | | TGAAAAGCAGCA | 26_6-6_internal_loop-symmetric_GGGGAU- | | |
| | | | | UAGGGG | | |
| 2871 | 58 | ML_generative_0639 | CCCTGGTGTGCCCTCTGATGTTTTTT | −20_6-6_internal_loop-symmetric_CAUCAU- | −20 | 26 |
| | | (−20, +26) | AGGGGATTCTACAGCAATACTCACC | UACUAC, −6_1-1_mismatch_G-A, −3→2_6- | | |
| | | | AGTCCCGATGTAAGCAATCTTTGCA | 6_internal_loop-symmetric_UACAGC-CCCGAU, | | |
| | | | TACTACGCAGCATTGGGATACAGTG | 4_1-1_wobble_U-G, 7_3-3_bulge- | | |
| | | | TGAAAAGCAGCA | symmetric_CUC-CAC, 14_1-1_mismatch_C-A, | | |
| | | | | 26_6-6_internal_loop-symmetric_GGGGAU- | | |
| | | | | UAGGGG | | |
| 2872 | 58 | ML_generative_0643 | CCCTGGTGTGCCCTCTGATGTTTTTT | −20_6-6_internal_loop-symmetric_CAUCAU- | −20 | 26 |
| | | (−20, +26) | AGGGGATTCTACGGCAGTACTGTGA | UACUAC, −7_1-1_wobble_U-G, −3→6_10- | | |
| | | | AATCCCGATGTCGGCAATCTTTGCA | 10_internal_loop-symmetric_UACAGCAUUG- | | |
| | | | TACTACGCAGCATTGGGATACAGTG | AAAUCCCGAU, 8_1-1_mismatch_U-U, 18_1- | | |
| | | | TGAAAAGCAGCA | 1_wobble_U-G, 26_6-6_internal_loop- | | |
| | | | | symmetric_GGGGAU-UAGGGG | | |
| 2873 | 59 | ML_generative_0644 | CCCTGGTGTGCCCTCTGATGTTTTTT | −20_6-6_internal_loop-symmetric_CAUCAU- | −20 | 26 |
| | | (−20, +26) | AGGGGATTCTACCGCAGGACGGAG | UACUAC, −7_0-1_bulge-asymmetric_-G, −6_1- | | |
| | | | CTATCCCGAGTTAGGCAATCTTTGC | 1_wobble_G-U, −2→5_8-7_internal_loop- | | |
| | | | ATACTACGCAGCATTGGGATACAGT | asymmetric_ACAGCAUU-UAUCCCG, 10_1- | | |
| | | | GTGAAAAGCAGCA | 1_mismatch_A-G, 13_1-1_mismatch_A-G, 18_1- | | |
| | | | | 1_mismatch_U-C, 26_6-6_internal_loop- | | |
| | | | | symmetric_GGGGAU-UAGGGG | | |
| 2874 | 59 | ML_generative_0690 | CCCTGGTGTGCCCTCTGATGTTTTTT | −20_6-6_internal_loop-symmetric_CAUCAU- | −20 | 26 |
| | | (−20, +26) | AGGGGATTCTACGGCATGACTGATC | UACUAC, −14_2-2_bulge-symmetric_AA-GA, | | |
| | | | AGTCCCGTGGTCGGACCCCGATGCA | −9_4-4_bulge-symmetric_AUUG-ACCC, −7_1- | | |
| | | | TACTACGCAGCATTGGGATACAGTG | 1_wobble_U-G, −3_1-1_wobble_U-G, 0_1- | | |
| | | | TGAAAAGCAGCA | 1_mismatch_A-C, 2_1-1_mismatch_C-C, 4_1- | | |
| | | | | 1_wobble_U-G, 7_1-1_mismatch_C-U, 13_2- | | |
| | | | | 2_bulge-symmetric_AC-UG, 18_1-1_wobble_U-G, | | |
| | | | | 26_6-6_internal_loop-symmetric_GGGGAU- | | |
| | | | | UAGGGG | | |
| 2875 | 60 | ML_generative_0699 | CCCTGGTGTGCCCTCTGATGTTTTTT | −20_6-6_internal_loop-symmetric_CAUCAU- | −20 | 26 |
| | | (−20, +26) | AGGGGATTCTACGGCAAGACTGGGC | UACUAC, −9_7-7_internal_loop- | | |
| | | | AGTCCCGTGGTCGGACCCCCGTGCA | symmetric_AAGAUUG-ACCCCCG, −7_1- | | |
| | | | TACTACGCAGCATTGGGATACAGTG | 1_wobble_U-G, -3_1-1_wobble_U-G, 0_1- | | |
| | | | TGAAAAGCAGCA | 1_mismatch_A-C, 2_1-1_mismatch_C-C, 4_1- | | |
| | | | | 1_wobble_U-G, 8_1-1_wobble_U-G, 13_2- | | |
| | | | | 2_bulge-symmetric_AC-AG, 18_1-1_wobble_U-G, | | |
| | | | | 26_6-6_internal_loop-symmetric_GGGGAU- | | |
| | | | | UAGGGG | | |
| 2876 | 60 | ML_generative_0701 | CCCTGGTGTGCCCTCTGATGTTTTTT | −20_6-6_internal_loop-symmetric_CAUCAU- | −20 | 26 |
| | | (−20, +26) | AGGGGATTCTACGGCAGGACTGGGC | UACUAC, −14_2-2_bulge-symmetric_AA-CG, | | |
| | | | TTTCCCGTGGTCGGACCTCCGTGCA | −9_3-3_bulge-symmetric_UUG-ACC, −7_1- | | |
| | | | TACTACGCAGCATTGGGATACAGTG | 1_wobble_U-G, −3_1-1_wobble_U-G, 0_1- | | |
| | | | TGAAAAGCAGCA | 1_mismatch_A-C, 2_1-1_mismatch_C-C, 4_2- | | |
| | | | | 2_bulge-symmetric_UU-UU, 8_1-1_wobble_U-G, | | |
| | | | | 13_1-1_mismatch_A-G, 18_1-1_wobble_U-G, | | |
| | | | | 26_6-6_internal_loop-symmetric_GGGGAU- | | |
| | | | | UAGGGG | | |
| 2877 | 61 | ML_exhaustive_ADA | CCCTGGTGTGCCCTCTGATGTTTTTT | −20_6-6_internal_loop-symmetric_CAUCAU- | −20 | 26 |
| | 73 | R2_0395 (−20, +26) | AGGGGATTCTACAGCACGACTGAGC | UACUAC, −13_1-1_mismatch_G-A, −1→0_2- | | |
| | | | AGTGCGCTAGTCAGCAATATTTGCA | 2_bulge-symmetric_CA-GC, 4_1-1_wobble_U-G, | | |
| | | | TACTACGCAGCATTGGGATACAGTG | 13_2-2_bulge-symmetric_AC-CG, 26_6- | | |
| | | | TGAAAAGCAGCA | 6_internal_loop-symmetric_GGGGAU-UAGGGG | | |
| 2878 | 61 | ML_exhaustive_ADA | CCCTGGTGTGCCCTCTGATGTTTTTT | −20_6-6_internal_loop-symmetric_CAUCAU- | −20 | 26 |
| | 73 | R2_0453 (−20, +26) | AGGGGATTCTACAGCAATACTCAGC | UACUAC, −10_1-1_mismatch_U-C, −1→0_2- | | |
| | | | AGTGCGCTAGTCAGCCATCTTTGCA | 2_bulge-symmetric_CA-GC, 4_1-1_wobble_U-G, | | |
| | | | TACTACGCAGCATTGGGATACAGTG | 9_1-1_mismatch_C-C, 14_1-1_mismatch_C-A, | | |
| | | | TGAAAAGCAGCA | 26_6-6_internal_loop-symmetric_GGGGAU- | | |
| | | | | UAGGGG | | |
| 2879 | 62 | ML_exhaustive_ADA | CCCTGGTGTGCCCTCTGATGTTTTTT | −20_6-6_internal_loop-symmetric_CAUCAU- | −20 | 26 |
| | | R1/2_0464 | AGGGGATTCTACAGCATGACTGAGC | UACUAC, −7_1-1_wobble_U-G, 0_1- | | |
| | | (−20, +26) | AGTCCCGTAGTCGGCAATCTTTGCA | 1_mismatch_A-C, 2_1-1_mismatch_C-C, 4_1- | | |
| | | | TACTACGCAGCATTGGGATACAGTG | 1_wobble_U-G, 13_2-2_bulge-symmetric_AC-UG, | | |
| | | | TGAAAAGCAGCA | 26_6-6_internal_loop-symmetric_GGGGAU- | | |
| | | | | UAGGGG | | |
| 2880 | 62 | ML exhaustive_ADA | CCCTGGTGTGCCCTCTGATGTTTTTT | −20_6-6_internal_loop-symmetric_CAUCAU- | −20 | 26 |
| | | R1/2_1042 | AGGGGATTCTACAGCAATACTCAGC | UACUAC, −13_1-1_mismatch_G-A, 0_1- | | |
| | | (−20, +26) | AGTTCCGTAGTCAGCAATATTTGCA | 1_mismatch_A-C, 2_1-1_mismatch_C-U, 4_1- | | |
| | | | TACTACGCAGCATTGGGATACAGTG | 1_wobble_U-G, 9_1-1_mismatch_C-C, 14_1- | | |
| | | | TGAAAAGCAGCA | 1_mismatch_C-A, 26_6-6_internal_loop- | | |
| | | | | symmetric_GGGGAU-UAGGGG | | |
| 2881 | 63 | ML_generative_0002 | CCCTGGTGTGCCCTCTGATGTTTTTT | −20_6-6_internal_loop-symmetric_CAUCAU- | −20 | 26 |
| | | (−20, +26) | AGGGGATTCTAGAGAGGTACTGTGC | UACUAC, −10_1-1_mismatch_U-C, −7_1- | | |
| | | | CATCCCGTGGTCGGCCATCTTTGCA | 1_wobble_U-G, -3_1-1_wobble_U-G, 0_1- | | |
| | | | TACTACGCAGCATTGGGATACAGTG | 1_mismatch_A-C, 2_1-1_mismatch_C-C, 5_1- | | |
| | | | TGAAAAGCAGCA | 1_mismatch_U-C, 8_1-1_mismatch_U-U, 15_1- | | |
| | | | | 1_wobble_U-G, 16_1-1_mismatch_G-A, 19_1- | | |
| | | | | 1_mismatch_G-G, 26_6-6_internal_loop- | | |
| | | | | symmetric_GGGGAU-UAGGGG | | |
| 2882 | 63 | ML_generative_0013 | CCCTGGTGTGCCCTCTGATGTTTTTT | −20_6-6_internal_loop-symmetric_CAUCAU- | −20 | 26 |
| | | (−20, +26) | AGGGGATTCTAGAGCAGGACGGTG | UACUAC, −7_1-1_wobble_U-G, −3_1- | | |
| | | | CAGTCCCGTGGTCGGCAATCTTTGC | 1_wobble_U-G, 0_1-1_mismatch_A-C, 2_1- | | |
| | | | ATACTACGCAGCATTGGGATACAGT | 1_mismatch_C-C, 4_1-1_wobble_U-G, 8_1- | | |
| | | | GTGAAAAGCAGCA | 1_mismatch_U-U, 10_1-1_mismatch_A-G, 13_1- | | |
| | | | | 1_mismatch_A-G, 19_1-1_mismatch_G-G, 26_6- | | |
| | | | | 6_internal_loop-symmetric_GGGGAU-UAGGGG | | |
| 2883 | 64 | ML_generative_0016 | CCCTGGTGTGCCCTCTGATGTTTTTT | −20_6-6_internal_loop-symmetric_CAUCAU- | −20 | 26 |
| | | (−20, +26) | AGGGGATTCTACAGGAGGACTGGG | UACUAC, −10_2-2_bulge-symmetric_UU-CU, | | |
| | | | CAGTCCCGTGGTCGCCCTTCTTTGCA | −8_1-1_mismatch_C-C, −7_1-1_wobble_U-G, −3_1- | | |
| | | | TACTACGCAGCATTGGGATACAGTG | 1_wobble_U-G, 0_1-1_mismatch_A-C, 2_1- | | |
| | | | TGAAAAGCAGCA | 1_mismatch_C-C, 4_1-1_wobble_U-G, 8_1- | | |
| | | | | 1_wobble_U-G, 13_1-1_mismatch_A-G, 16_1- | | |
| | | | | 1_mismatch_G-G, 26_6-6_internal_loop- | | |
| | | | | symmetric_GGGGAU-UAGGGG | | |
| 2884 | 64 | ML_generative_0043 | CCCTGGTGTGCCCTCTGATGTTTTTT | −20_6-6_internal_loop-symmetric_CAUCAU- | −20 | 26 |
| | | (−20, +26) | AGGGGATTCTACAGCGGTACTGTGC | UACUAC, −10_1-1_mismatch_U-C, −9_1- | | |
| | | | AAATCCGTGGTCGGTCATCTTTGCA | 1_wobble_G-U, −7_1-1_wobble_U-G, −3_1- | | |
| | | | TACTACGCAGCATTGGGATACAGTG | 1_wobble_U-G, 0_1-1_mismatch_A-C, 2_2- | | |
| | | | TGAAAAGCAGCA | 2_bulge-symmetric_CA-AU, 8_1-1_mismatch_U- | | |
| | | | | U, 15_1-1_wobble_U-G, 26_6-6_internal_loop- | | |
| | | | | symmetric_GGGGAU-UAGGGG | | |
| 2885 | 65 | ML_generative_0058 | CCCTGGTGTGCCCTCTGATGTTTTTT | −20_6-6_internal_loop-symmetric_CAUCAU- | −20 | 26 |
| | | (−20, +26) | AGGGGATTCTACGGCAGGACTGGG | UACUAC, −10_1-1_mismatch_U-C, −7_1- | | |
| | | | GAAATCCGTGGTCGGCCATCTTTGC | 1_wobble_U-G, −3_1-1_wobble_U-G, 0_1- | | |
| | | | ATACTACGCAGCATTGGGATACAGT | 1_mismatch_A-C, 2_2-2_bulge-symmetric_CA- | | |
| | | | GTGAAAAGCAGCA | AU, 6_1-1_mismatch_G-G, 8_1-1_wobble_U-G, | | |
| | | | | 13_1-1_mismatch_A-G, 18_1-1_wobble_U-G, | | |
| | | | | 26_6-6_internal_loop-symmetric_GGGGAU- | | |
| | | | | UAGGGG | | |
| 2886 | 65 | ML_generative_0071 | CCCTGGTGTGCCCTCTGATGTTTTTT | −20_6-6_internal_loop-symmetric_CAUCAU- | −20 | 26 |
| | | (−20, +26) | AGGGGATTCTACAGCGGTACTGCGC | UACUAC, −10_1-1_mismatch_U-C, −8_1- | | |
| | | | AGTCCCGTGGTGGTCCATCTTTGCA | 1_mismatch_C-U, −7_1-1_wobble_U-G, −6_1- | | |
| | | | TACTACGCAGCATTGGGATACAGTG | 1_mismatch_G-G, −3_1-1_wobble_U-G, 0_1- | | |
| | | | TGAAAAGCAGCA | 1_mismatch_A-C, 2_1-1_mismatch_C-C, 4_1- | | |
| | | | | wobble_U-G, 8_1-1_mismatch_U-C, 15_1- | | |
| | | | | 1_wobble_U-G, 26_6-6_internal_loop- | | |
| | | | | symmetric_GGGGAU-UAGGGG | | |
| 2887 | 66 | ML_generative_0130 | CCCTGGTGTGCCCTCTGATGTTTTTT | −20_6-6_internal_loop-symmetric_CAUCAU- | −20 | 26 |
| | | (−20, +26) | AGGGGATTCTATAGCAGGAATGAG | UACUAC, −7_1-1_wobble_U-G, −3_1- | | |
| | | | GAAATCCGTGGTCGGCAATCTTTGC | 1_wobble_U-G, 0_1-1_mismatch_A-C, 2_2- | | |
| | | | ATACTACGCAGCATTGGGATACAGT | 2_bulge-symmetric_CA-AU, 6_1-1_mismatch_G- | | |
| | | | GTGAAAAGCAGCA | G, 11_3-3_bulge-symmetric_GUA-GAA, 19_1- | | |
| | | | | 1_wobble_G-U, 26_6-6_internal_loop- | | |
| | | | | symmetric_GGGGAU-UAGGGG | | |
| 2888 | 66 | ML_generative_0156 | CCCTGGTGTGCCCTCTGATGTTTTTT | −20_6-6_internal_loop-symmetric_CAUCAU- | −20 | 26 |
| | | (−20, +26) | AGGGGATTCTACAGCAGTACTCAGG | UACUAC, −9_2-2_bulge-symmetric_UG-AU, | | |
| | | | AAATCCGTGGTCGGATATCTTTGCA | −7_1-1_wobble_U-G, −3_1-1_wobble_U-G, 0_1- | | |
| | | | TACTACGCAGCATTGGGATACAGTG | 1_mismatch_A-C, 2_2-2_bulge-symmetric_CA- | | |
| | | | TGAAAAGCAGCA | AU, 6_1-1_mismatch_G-G, 9_1-1_mismatch_C-C, | | |
| | | | | 26_6-6_internal_loop-symmetric_GGGGAU- | | |
| | | | | UAGGGG | | |
| 2889 | 67 | ML_generative_0176 | CCCTGGTGTGCCCTCTGATGTTTTTT | −20_6-6_internal_loop-symmetric_CAUCAU- | −20 | 26 |
| | | (−20, +26) | AGGGGATTCTAAAGCAGGAGTGAG | UACUAC, −7_1-1_wobble_U-G, −3_1- | | |
| | | | CAGATCCGTGGTCGGCAATCTTTGC | 1_wobble_U-G, 0→3_4-4_bulge- | | |
| | | | ATACTACGCAGCATTGGGATACAGT | symmetric_AGCA-AUCC, 4_1-1_wobble_U-G, | | |
| | | | GTGAAAAGCAGCA | 11_1-1_mismatch_G-G, 13_1-1_mismatch_A-G, | | |
| | | | | 19_1-1_mismatch_G-A, 26_6-6_internal_loop- | | |
| | | | | symmetric_GGGGAU-UAGGGG | | |
| 2890 | 67 | ML_generative_0218 | CCCTGGTGTGCCCTCTGATGTTTTTT | −20_6-6_internal_loop-symmetric_CAUCAU- | −20 | 26 |
| | | (−20, +26) | AGGGGATTCTACAGGTGTACTGTGA | UACUAC, −8_2-2_bulge-symmetric_GC-UA, | | |
| | | | AATCCCGTGGTCATAAATCTTTGCA | −3_1-1_wobble_U-G, 0_1-1_mismatch_A-C, 2_1- | | |
| | | | TACTACGCAGCATTGGGATACAGTG | 1_mismatch_C-C, 6_1-1_mismatch_G-A, 8_1- | | |
| | | | TGAAAAGCAGCA | 1_mismatch_U-U, 15_2-2_bulge-symmetric_UG- | | |
| | | | | GU, 26_6-6_internal_loop-symmetric_GGGGAU- | | |
| | | | | UAGGGG | | |
| 2891 | 68 | ML_exhaustive_ADA | CCCTGGTGTGCCCTCTGATGTTTTTT | −20_6-6_internal_loop-symmetric_CAUCAU- | −20 | 26 |
| | | R1/2_1045 | AGGGGATTCTACAGCATTACTCAGC | UACUAC, −13_1-1_mismatch_G-A, 0_1- | | |
| | | (−20, +26) | AGTCCCGTAGTCAGCAATATTTGCA | 1_mismatch_A-C, 2_1-1_mismatch_C-C, 4_1- | | |
| | | | TACTACGCAGCATTGGGATACAGTG | 1_wobble_U-G, 9_1-1_mismatch_C-C, 14_1- | | |
| | | | TGAAAAGCAGCA | 1_mismatch_C-U, 26_6-6_internal_loop- | | |
| | | | | symmetric_GGGGAU-UAGGGG | | |
| 2892 | 68 | ML_exhaustive_ADA | CCCTGGTGTGCCCTCTGATGTTTTTT | −20_6-6_internal_loop-symmetric_CAUCAU- | −20 | 26 |
| | | R1/2_1540 | AGGGGATTCTACAGCATTACTCAGC | UACUAC, −9_1-1_mismatch_G-A, 0_1- | | |
| | | (−20, +26) | AAATCCGTAGTCAGAAATCTTTGCA | 1_mismatch_A-C, 2_2-2_bulge-symmetric_CA- | | |
| | | | TACTACGCAGCATTGGGATACAGTG | AU, 9_1-1_mismatch_C-C, 14_1-1_mismatch_C- | | |
| | | | TGAAAAGCAGCA | U, 26_6-6_internal_loop-symmetric_GGGGAU- | | |
| | | | | UAGGGG | | |
| 2893 | 69 | ML_exhaustive_ADA | CCCTGGTGTGCCCTCTGATGTTTTTT | −20_6-6_internal_loop-symmetric_CAUCAU- | −20 | 26 |
| | | R1_0315 (−20, +26) | AGGGGATTCTACAGCAGGACTGAGC | UACUAC, −13_1-1_mismatch_G-A, −3_1- | | |
| | | | AATCTTGTGGTCAGCAATATTTGCA | 1_wobble_U-G, 1_1-1_wobble_G-U, 2_1- | | |
| | | | TACTACGCAGCATTGGGATACAGTG | 1_mismatch_C-C, 13_1-1_mismatch_A-G, 26_6- | | |
| | | | TGAAAAGCAGCA | 6_internal_loop-symmetric_GGGGAU-UAGGGG | | |
| 2894 | 69 | ML_exhaustive_ADA | CCCTGGTGTGCCCTCTGATGTTTTTT | −20_6-6_internal_loop-symmetric_CAUCAU- | −20 | 26 |
| | | R1_0414 (−20, +26) | AGGGGATTCTACAGCAGGACTGAGC | UACUAC, −13_1-1_mismatch_G-A, −3_1- | | |
| | | | AATGGAGTGGTCAGCAATATTTGCA | 1_wobble_U-G, 0→1_2-2_bulge-symmetric_AG- | | |
| | | | TACTACGCAGCATTGGGATACAGTG | GA, 13_1-1_mismatch_A-G, 26_6-6_internal_loop- | | |
| | | | TGAAAAGCAGCA | symmetric_GGGGAU-UAGGGG | | |
| 2895 | 70 | ML_exhaustive_ADA | CCCTGGTGTGCCCTCTGATGTTTTTT | −20_6-6_internal_loop-symmetric_CAUCAU- | −20 | 26 |
| | 73 | R2_0013 (−20, +26) | AGGGGATTCTACAGCACGACTGAGC | UACUAC, −10_1-1_mismatch_U-C, −1→0_2- | | |
| | | | AGTGCGTTAGTCAGCCATCTTTGCA | 2_bulge-symmetric_CA-GU, 4_1-1_wobble_U-G, | | |
| | | | TACTACGCAGCATTGGGATACAGTG | 13_2-2_bulge-symmetric_AC-CG, 26_6- | | |
| | | | TGAAAAGCAGCA | 6_internal_loop-symmetric_GGGGAU-UAGGGG | | |

[0454] FIG. 71A and FIG. 71B shows selection of two exemplary engineered guide RNAs displaying superior editing that were selected for further engineering.

[0455] Of note, the machine learning algorithm provided an accurate prediction of ADAR specificity. As shown in FIG. 72, guide RNAs selected for ADAR1, ADAR2, or ADAR1 and ADAR2 displayed specificity for the appropriate ADAR enzyme in vitro. FIG. 73 depicts engineered guide RNA designs that showed specificity for ADAR2 in FIG. 72. In this system, engineered guide RNAs designed to form an A-G mismatch at the target adenosine exhibited facilitating preferential RNA editing by ADAR2.

[0456] FIG. 74A and FIG. 74B show the top performing engineered guide RNAs that display specificity for ADAR1+ADAR2. FIG. 75A and FIG. 75B show the top performing engineered guide RNAs that display specificity for ADAR2. FIG. 76A and FIG. 76B show the top performing engineered guide RNAs that display specificity for ADAR1.

### Example 22

ML gRNAs Targeting LRRK2

[0457] This example describes machine learning (ML)-derived gRNAs targeting LRRK2. Two machine learning model types were utilized, a generative model and an exhaustive model, to engineer LRRK2 gRNAs that were subsequently evaluated. Next-generation sequencing (NGS) was used to compare highly efficient and specific ML-derived gRNAs and gRNAs generated using in vitro high throughput screening (HTS) methods. gRNAs were dosed in HEK293 cells expressing a LRRK2 cDNA minigene. Two generative ML gRNAs, in particular, leveraged ADAR to facilitate highly efficient and specific RNA editing (FIG. 64—CCCTGGTGTGCCCTCTGATGTTTTTTAGGGGATTCTACAGGAGGACTGGGCAGTCCCGTGGTCGC CCTTCTTTGCATACTACGCAGCATTGGGATACAGTGTGAAAAGCAGCA (SEQ ID NO: 2769), FIG. 56—CCCTGGTGTGCCCTCTGATGTTTTTTAGGGGATTCTACAGCAGTACTGTCCAGTCCCGTGGTCGT AAATCTTTGCATACTACGCAGCATTGGGATACAGTGTGAAAAGCAGCA (SEQ ID NO: 2770), and FIG. 77).

[0458] In addition, gRNAs that preferentially leverage ADAR2 for RNA editing are also disclosed herein (e.g., FIG. 54—CCCTGGTGTGCCCTCTGATGTTTTTTAGGGGATTCTACAGCACGACTGAGCAGTGCGTTAGTCGG CAATCTTTGCATACTACGCAGCATTGGGATACAGTGTGAAAAGCAGCA (SEQ ID NO: 2771)). FIG. 72 shows a plot of ADAR1+2% on-target editing (x-axis) versus ADAR1-only % on-target editing (y-axis). As shown in this figure, several gRNAs of the present disclosure (structures of the guide-target RNA scaffold shown in FIG. 73), that comprise an A-G mismatch, show an ADAR2 preference. Thus, an A-G mismatch at the target A may potentially drive ADAR2-specific editing.

### Example 23

### Engineering of LRRK2 Guide RNAs Selected Using HTS

[0459] This example describes engineering of guide RNAs using a high throughput screen (see EXAMPLE 14) for targeting of the LRRK2 G2019S mutation for RNA editing by ADAR. FIG. 78 provides an overview of the engineering process. As depicted in FIG. 78, the engineering process includes: 1. positioning of the macro-footprint; 2. fine-tuning of the left-barbell and right-barbell coordinates; and 3. shortening of the guide length. LRRK2 guide RNAs count610 (−14, 26)—SEQ ID NO: 121, count871 (−16, 24)—SEQ ID NO: 139, and count919 (−12, 24)—SEQ ID NO: 166 were selected for further engineering.

[0460] The addition of barbell macro-footprints formed in the guide-target RNA scaffold results in an increase in on-target adenosine editing relative to the amount of off-target editing. As demonstrated in FIG. 79A and FIG. 79B, guide610 (forms a barbell macro-footprint upon hybridization to target RNA with barbells at position −14, +26) displayed a reduction in off-target editing for both ADAR1 and ADAR1+ADAR2, relative to the same engineered guide RNAs lacking the latent structure that would result in a a barbell macro-footprint upon hybridization to target RNA.

[0461] FIG. 80A-FIG. 80C depict the first step of the design process for guide 610: positioning of the macro-footprint. FIG. 80A shows tiling of the macro-footprint positioning within the guide-target RNA scaffold for guide610 with respect to the A/C mismatch and how this tiling affects RNA editing by ADAR1 and ADAR1+ADAR2. FIG. 80B shows the percent editing for the tiled guide610 variants via ADAR1. As noted, the engineered guide RNA with the mismatch positioned 60 nucleotides (0.100.60) from the end of the guide, displaying a LRRK2 editing of 36%, was selected for further engineering. FIG. 80C shows the percent editing for the tiled guide610 variants via ADAR1+ADAR2. As noted, the engineered guide RNA with the mismatch positioned 60 nucleotides (0.100.60) from the end of the engineered guide RNA, displaying a LRRK2 editing of 58%, was selected for further engineering.

[0462] The 0.100.60 guide610 was carried into the next step of design: fine-tuning of the left-barbell and right-barbell coordinates. FIG. 81A-FIG. 81C show engineering of the right barbell coordinates. As shown in FIG. 81A, the coordinate of the right barbell was tiled between the following coordinates with respect to the A/C mismatch: +22, +23, +24, +25, +26, +28, +30, +32, and +34, and the effect of each position on ADAR1 and ADAR1+ADAR2 editing was determined. FIG. 81B shows the percent editing for the tiled guide610 variants via ADAR1. As noted, the guide with the right barbell at position +34 (with respect to the A/C mismatch), displaying a LRRK2 editing of 41%, was selected for further engineering. FIG. 81C shows the percent editing for the tiled guide610 variants via ADAR1+ADAR2. As noted, the guide with the right barbell at position +34 (with respect to the A/C mismatch), displaying a LRRK2 editing of 50% via ADAR, was selected for further engineering.

[0463] The 0.100.60 guide610 having a right barbell at position +34 (with respect to the A/C mismatch) was utilized as a starting scaffold for left-barbell coordinate tiling. FIG. 82A and FIG. 82B show engineering of the left barbell coordinates. As shown in FIG. 82A, the coordinate of the left barbell was tiled between the following coordinates with respect to the A/C mismatch: −10, −12, −14, −16, −18, −20, −22, and −24, and the effect of each position on ADAR1 and ADAR1+ADAR2 editing was determined. FIG. 82B shows the percent editing for the tiled guide610 variants via ADAR1. As noted, the guide with the left barbell at position −10 and right barbell at position +34 (with respect to the A/C mismatch), displaying a LRRK2 editing of 50% via ADAR, was selected for further engineering.

[0464] The guide610 variant having barbell coordinates at (−10, +34) was then subjected to the third stage of design: shortening of the guide length. FIG. 83A and FIG. 83B show engineering of the guide length. As shown in FIG. 83A, the effect of each guide length on ADAR1 and ADAR1+ADAR2 editing was determined. FIG. 83B shows the percent editing for the guide610 variants of varying length via ADAR1. As noted, the engineered guide RNA having a length of 92 nt with the mismatch positioned 60 nt from the end of the guide (0.92.60), displaying a LRRK2 editing of 60%, was selected as the top performing guide. TABLE 12 below recites the sequences of the engineered guide610 RNAs depicted in FIGS. 79A-83B. While the engineered guide RNA sequences in TABLE 12 are provided as DNA sequences with a T substituted for each U, the corresponding RNA sequences are also encompassed herein.

TABLE 12
Engineered LRRK2 Guide610 Variant Sequences

| SEQ | | | | | Left | Right |
|---|---|---|---|---|---|---|
| ID | | | | | Barbell | Barbell |
| NO | FIG. | Guide Name | Sequence | Structural Features (target/guide) | Position | Position |
| 120 | 79A | 610 (no loops) | CCCTGGTGTGCCCTCTGATGTTTTT | −49_1-1_wobble_U-G, −4_1- | | |
| | | | ATCCCCATTCTACATCTGTAGTGA | 1_mismatch_C-C, −3_1-1_wobble_U-G, | | |
| | | | GCAATTCCGTGCTCAGCAATCTTT | 0_1-1_mismatch_A-C, 2_1- | | |
| | | | GCAATGATGGCAGCATTGGGATA | 1_mismatch_C-U, 11_1-1_mismatch_G- | | |
| | | | CAGTGTGAAGAGCAGCA | G, 15_1-1_mismatch_U-U, 17_1- | | |
| | | | | 1_mismatch_C-U | | |
| 121 | 79B | 610 (−14, +26) | CCCTGGTGTGCCCTCTGATGTTTTT | −49_1-1_wobble_U-G, −14_6- | −14 | 26 |
| | | | TAGGGGATTCTACATCTGTAGTGA | 6_internal_loop-symmetric_UGCAAA- | | |
| | | | GCAATTCCGTGCTCAGCAATCAAA | AAACGU, −4_1-1_mismatch_C-C, | | |
| | | | CGTATGATGGCAGCATTGGGATAC | −3_1-1_wobble_U-G, 0_1- | | |
| | | | AGTGTGAAGAGCAGCA | 1_mismatch_A-C, 2_1-1_mismatch_C- | | |
| | | | | U, 11_1-1_mismatch_G-G, 15_1- | | |
| | | | | 1_mismatch_U-U, 17_1-1_mismatch_C- | | |
| | | | | U, 26_6-6_internal_loop- | | |
| | | | | symmetric_GGGGAU-UAGGGG | | |
| 2896 | 80A-80C | 610 (−14, +26) | AACTTCAGGTGCACGAAACCCTG | −14_6-6_internal_loop- | −14 | 26 |
| | | 0.100.75 | GTGTGCCCTCTGATGTTTTTTAGG | symmetric_UGCAAA-AAACGU, −4_1- | | |
| | | | GGATTCTACATCTGTAGTGAGCAA | 1_mismatch_C-C, −3_1-1_wobble_U-G, | | |
| | | | TTCCGTGCTCAGCAATCAAACGTA | 0_1-1_mismatch_A-C, 2_1- | | |
| | | | TGATG | 1_mismatch_C-U, 11_1-1_mismatch_G- | | |
| | | | | G, 15_1-1_mismatch_U-U, 17_1- | | |
| | | | | 1_mismatch_C-U, 26_6- | | |
| | | | | 6_internal_loop-symmetric_GGGGAU- | | |
| | | | | UAGGGG | | |
| 2897 | 80A-80C | 610 (−14, +26) | CAGGTGCACGAAACCCTGGTGTG | −14_6-6_internal_loop- | −14 | 26 |
| | | 0.100.70 | CCCTCTGATGTTTTTTAGGGGATT | symmetric_UGCAAA-AAACGU, −4_1- | | |
| | | | CTACATCTGTAGTGAGCAATTCCG | 1_mismatch_C-C, −3_1-1_wobble_U-G, | | |
| | | | TGCTCAGCAATCAAACGTATGATG | 0_1-1_mismatch_A-C, 2_1- | | |
| | | | GCAGC | 1_mismatch_C-U, 11_1-1_mismatch_G- | | |
| | | | | G, 15_1-1_mismatch_U-U, 17_1- | | |
| | | | | 1_mismatch_C-U, 26_6- | | |
| | | | | 6_internal_loop-symmetric_GGGGAU- | | |
| | | | | UAGGGG | | |
| 288 | 80A-80C | 610 (−14, +26) | GCACGAAACCCTGGTGTGCCCTCT | −14_6-6_internal_loop- | −14 | 26 |
| | | 0.100.65 | GATGTTTTTTAGGGGATTCTACAT | symmetric_UGCAAA-AAACGU, −4_1- | | |
| | | | CTGTAGTGAGCAATTCCGTGCTCA | 1_mismatch_C-C, −3_1-1_wobble_U-G, | | |
| | | | GCAATCAAACGTATGATGGCAGC | 0_1-1_mismatch_A-C, 2_1- | | |
| | | | ATTGG | 1_mismatch_C-U, 11_1-1_mismatch_G- | | |
| | | | | G, 15_1-1_mismatch_U-U, 17_1- | | |
| | | | | 1_mismatch_C-U, 26_6- | | |
| | | | | 6_internal_loop-symmetric_GGGGAU- | | |
| | | | | UAGGGG | | |
| 2899 | 80A-80C | 610 (−14, +26) | AAACCCTGGTGTGCCCTCTGATGT | −14_6-6_internal_loop- | −14 | 26 |
| | | 0.100.60 | TTTTTAGGGGATTCTACATCTGTA | symmetric_UGCAAA-AAACGU, −4_1- | | |
| | | | GTGAGCAATTCCGTGCTCAGCAAT | 1_mismatch_C-C, −3_1-1_wobble_U-G, | | |
| | | | CAAACGTATGATGGCAGCATTGG | 0_1-1_mismatch_A-C, 2_1- | | |
| | | | GATAC | 1_mismatch_C-U, 11_1-1_mismatch_G- | | |
| | | | | G, 15_1-1_mismatch_U-U, 17_1- | | |
| | | | | 1_mismatch_C-U, 26_6- | | |
| | | | | 6_internal_loop-symmetric_GGGGAU- | | |
| | | | | UAGGGG | | |
| 2900 | 80A-80C | 610 (−14, +26) | CTGGTGTGCCCTCTGATGTTTTTTA | −4_6-6_internal_loop- | −14 | 26 |
| | | 0.100.55 | GGGGATTCTACATCTGTAGTGAGC | symmetric_UGCAAA-AAACGU, −4_1- | | |
| | | | AATTCCGTGCTCAGCAATCAAACG | 1_mismatch_C-C, −3_1-1_wobble_U-G, | | |
| | | | TATGATGGCAGCATTGGGATACA | 0_1-1_mismatch_A-C, 2_1- | | |
| | | | GTGT | 1_mismatch_C-U, 11_1-1_mismatch_G- | | |
| | | | | G, 15_1-1_mismatch_U-U, 17_1- | | |
| | | | | 1_mismatch_C-U, 26_6- | | |
| | | | | 6_internal_loop-symmetric_GGGGAU- | | |
| | | | | UAGGGG | | |
| 2901 | 80A-80C | 610 (−14, +26) | GTGCCCTCTGATGTTTTTTAGGGG | −14_6-6_internal_loop- | −14 | 26 |
| | | 0.100.50 | ATTCTACATCTGTAGTGAGCAATT | symmetric_UGCAAA-AAACGU, −4_1- | | |
| | | | CCGTGCTCAGCAATCAAACGTATG | 1_mismatch_C-C, −3_1-1_wobble_U-G, | | |
| | | | ATGGCAGCATTGGGATACAGTGT | 0_1-1_mismatch_A-C, 2_1- | | |
| | | | GAAAA | 1_mismatch_C-U, 11_1-1_mismatch_G- | | |
| | | | | G, 15_1-1_mismatch_U-U, 17_1- | | |
| | | | | 1_mismatch_C-U, 26_6- | | |
| | | | | 6_internal_loop-symmetric_GGGGAU- | | |
| | | | | UAGGGG | | |
| 121 | 80A-80C | 610 (−14, +26) | CCCTGGTGTGCCCTCTGATGTTTTT | −49_1-1_wobble_U-G, −14_6- | −14 | 26 |
| | | 0.113.57 | TAGGGGATTCTACATCTGTAGTGA | 6_internal_loop-symmetric_UGCAAA- | | |
| | | | GCAATTCCGTGCTCAGCAATCAAA | AAACGU, −4_1-1_mismatch_C-C, | | |
| | | | CGTATGATGGCAGCATTGGGATAC | −3_1-1_wobble_U-G, 0_1- | | |
| | | | AGTGTGAAGAGCAGCA | 1_mismatch_A-C, 2_1-1_mismatch_C- | | |
| | | | | U, 11_1-1_mismatch_G-G, 15_1- | | |
| | | | | 1_mismatch_U-U, 17_1-1_mismatch_C- | | |
| | | | | U, 26_6-6_internal_loop- | | |
| | | | | symmetric_GGGGAU-UAGGGG | | |
| 2902 | 81A-81C | 610 (−14, +34) | AAACCCTGGTGTGCCCTCTGTCCA | −14_6-6_internal_loop- | −14 | 34 |
| | | 0.100.60 | AATTATCCCCATTCTACATCTGTA | symmetric_UGCAAA-AAACGU, −4_1- | | |
| | | | GTGAGCAATTCCGTGCTCAGCAAT | 1_mismatch_C-C, −3_1-1_wobble_U-G, | | |
| | | | CAAACGTATGATGGCAGCATTGG | 0_1-1_mismatch_A-C, 2_1- | | |
| | | | GATAC | 1_mismatch_C-U, 11_1-1_mismatch_G- | | |
| | | | | G, 15_1-1_mismatch_U-U, 17_1- | | |
| | | | | 1_mismatch_C-U, 34_6- | | |
| | | | | 6_internal_loop-symmetric_AAACAU- | | |
| | | | | UCCAAA | | |
| 2903 | 81A-81C | 610 (−14, +32) | AAACCCTGGTGTGCCCTCTGATCA | −14_6-6_internal_loop- | −14 | 32 |
| | | 0.100.60 | AAACATCCCCATTCTACATCTGTA | symmetric_UGCAAA-AAACGU, −4_1- | | |
| | | | GTGAGCAATTCCGTGCTCAGCAAT | 1_mismatch_C-C, −3_1-1_wobble_U-G, | | |
| | | | CAAACGTATGATGGCAGCATTGG | 0_1-1_mismatch_A-C, 2_1- | | |
| | | | GATAC | 1_mismatch_C-U, 11_1-1_mismatch_G- | | |
| | | | | G, 15_1-1_mismatch_U-U, 17_1- | | |
| | | | | 1_mismatch_C-U, 32_6- | | |
| | | | | 6_internal_loop-symmetric_AAAAAC- | | |
| | | | | CAAAAC | | |
| 2904 | 81A-81C | 610 (−14, +30) | AAACCCTGGTGTGCCCTCTGATGT | −14_6-6_internal_loop- | −14 | 30 |
| | | 0.100.60 | AAACTACCCCATTCTACATCTGTA | symmetric_UGCAAA-AAACGU, −4_1- | | |
| | | | GTGAGCAATTCCGTGCTCAGCAAT | 1_mismatch_C-C, −3_1-1_wobble_U-G, | | |
| | | | CAAACGTATGATGGCAGCATTGG | 0_1-1_mismatch_A-C, 2_1- | | |
| | | | GATAC | 1_mismatch_C-U, 11_1-1_mismatch_G- | | |
| | | | | G, 15_1-1_mismatch_U-U, 17_1- | | |
| | | | | 1_mismatch_C-U, 30_6- | | |
| | | | | 6_internal_loop-symmetric_AUAAAA- | | |
| | | | | AAACUA | | |
| 2905 | 81A-81C | 610 (−14, +28) | AAACCCTGGTGTGCCCTCTGATGT | −14_6-6_internal_loop- | −14 | 28 |
| | | 0.100.60 | TTACTAGGCCATTCTACATCTGTA | symmetric_UGCAAA-AAACGU, −4_1- | | |
| | | | GTGAGCAATTCCGTGCTCAGCAAT | 1_mismatch_C-C, −3_1-1_wobble_U-G, | | |
| | | | CAAACGTATGATGGCAGCATTGG | 0_1-1_mismatch_A-C, 2_1- | | |
| | | | GATAC | 1_mismatch_C-U, 11_1-1_mismatch_G- | | |
| | | | | G, 15_1-1_mismatch_U-U, 17_1- | | |
| | | | | 1_mismatch_C-U, 28_6- | | |
| | | | | 6_internal_loop-symmetric_GGAUAA- | | |
| | | | | ACUAGG | | |
| 2899 | 81A-81C | 610 (−14, +26) | AAACCCTGGTGTGCCCTCTGATGT | −14_6-6_internal_loop- | −14 | 26 |
| | | 0.100.60 | TTTTTAGGGGATTCTACATCTGTA | symmetric_UGCAAA-AAACGU, −4_1- | | |
| | | | GTGAGCAATTCCGTGCTCAGCAAT | 1_mismatch_C-C, −3_1-1_wobble_U-G, | | |
| | | | CAAACGTATGATGGCAGCATTGG | 0_1-1_mismatch_A-C, 2_1- | | |
| | | | GATAC | 1_mismatch_C-U, 11_1-1_mismatch_G- | | |
| | | | | G, 15_1-1_mismatch_U-U, 17_1- | | |
| | | | | 1_mismatch_C-U, 26_6- | | |
| | | | | 6_internal_loop-symmetric_GGGGAU- | | |
| | | | | UAGGGG | | |
| 2906 | 81A-81C | 610 (−14, +25) | AAACCCTGGTGTGCCCTCTGATGT | | −14 | 28 |
| | | 0.100.60 | TTTTAAGGGGTTTCTACATCTGTA | | | |
| | | | GTGAGCAATTCCGTGCTCAGCAAT | | | |
| | | | CAAACGTATGATGGCAGCATTGG | | | |
| | | | GATAC | | | |
| 2907 | 81A-81C | 610 (−14, +24) | AAACCCTGGTGTGCCCTCTGATGT | −14_6-6_internal_loop- | −14 | 24 |
| | | 0.100.60 | TTTTATGGGGTCTCTACATCTGTA | symmetric_UGCAAA-AAACGU, −4_1- | | |
| | | | GTGAGCAATTCCGTGCTCAGCAAT | 1_mismatch_C-C, −3_1-1_wobble_U-G, | | |
| | | | CAAACGTATGATGGCAGCATTGG | 0_1-1_mismatch_A-C, 2_1- | | |
| | | | GATAC | 1_mismatch_C-U, 11_1-1_mismatch_G- | | |
| | | | | G, 15_1-1_mismatch_U-U, 17_1- | | |
| | | | | 1_mismatch_C-U, 24_6- | | |
| | | | | 6_internal_loop-symmetric_AUGGGG- | | |
| | | | | GGGGUC | | |
| 2908 | 81A-81C | 610 (−14, +23) | AAACCCTGGTGTGCCCTCTGATGT | −14_6-6_internal_loop- | −14 | 23 |
| | | 0.100.60 | TTTTATCGGGTCACTACATCTGTA | symmetric_UGCAAA-AAACGU, −4_1- | | |
| | | | GTGAGCAATTCCGTGCTCAGCAAT | 1_mismatch_C-C, −3_1-1_wobble_U-G, | | |
| | | | CAAACGTATGATGGCAGCATTGG | 0_1-1_mismatch_A-C, 2_1- | | |
| | | | GATAC | 1_mismatch_C-U, 11_1-1_mismatch_G- | | |
| | | | | G, 15_1-1_mismatch_U-U, 17_1- | | |
| | | | | 1_mismatch_C-U, 23_6- | | |
| | | | | 6_internal_loop-symmetric_AAUGGG- | | |
| | | | | GGGUCA | | |
| 2909 | 81A-81C | 610 (−14, +22) | AAACCCTGGTGTGCCCTCTGATGT | −14_6-6_internal_loop- | −14 | 22 |
| | | 0.100.60 | TTTTATCCGGTCAGTACATCTGTA | symmetric_UGCAAA-AAACGU, −4_1- | | |
| | | | GTGAGCAATTCCGTGCTCAGCAAT | 1_mismatch_C-C, −3_1-1_wobble_U-G, | | |
| | | | CAAACGTATGATGGCAGCATTGG | 0_1-1_mismatch_A-C, 2_1- | | |
| | | | GATAC | 1_mismatch_C-U, 11_1-1_mismatch_G- | | |
| | | | | G, 15_1-1_mismatch_U-U, 17_1- | | |
| | | | | 1_mismatch_C-U, 22_6- | | |
| | | | | 6_internal_loop-symmetric_GAAUGG- | | |
| | | | | GGUCAG | | |
| 2910 | 82A-82B | 610 (−24, +34) | AAACCCTGGTGTGCCCTCTGTCCA | −24_6-6_internal_loop- | −24 | 34 |
| | | 0.100.60 | AATTATCCCCATTCTACATCTGTA | symmetric_CUGCCA-ACUGUC, −4_1- | | |
| | | | GTGAGCAATTCCGTGCTCAGCAAT | 1_mismatch_C-C, −3_1-1_wobble_U-G, | | |
| | | | CTTTGCAATGAACTGTCCATTGGG | 0_1-1_mismatch_A-C, 2_1- | | |
| | | | ATAC | 1_mismatch_C-U, 11_1-1_mismatch_G- | | |
| | | | | G, 15_1-1_mismatch_U-U, 17_1- | | |
| | | | | 1_mismatch_C-U, 34_6- | | |
| | | | | 6_internal_loop-symmetric_AAACAU- | | |
| | | | | UCCAAA | | |
| 2911 | 82A-82B | 610 (−22, +34) | AAACCCTGGTGTGCCCTCTGTCCA | −22 6-6_internal_loop- | −22 | 34 |
| | | 0.100.60 | AATTATCCCCATTCTACATCTGTA | symmetric_GCCAUC-CUACUG, −4_1- | | |
| | | | GTGAGCAATTCCGTGCTCAGCAAT | 1_mismatch_C-C, −3_1-1_wobble_U-G, | | |
| | | | CTTTGCAATCTACTGAGCATTGGG | 0_1-1_mismatch_A-C, 2_1- | | |
| | | | ATAC | 1_mismatch_C-U, 11_1-1_mismatch_G- | | |
| | | | | G, 15_1-1_mismatch_U-U, 17_1- | | |
| | | | | 1_mismatch_C-U, 34_6- | | |
| | | | | 6_internal_loop-symmetric_AAACAU- | | |
| | | | | UCCAAA | | |
| 2912 | 82A-82B | 610 (−20, +34) | AAACCCTGGTGTGCCCTCTGTCCA | −20_6-6_internal_loop- | −20 | 34 |
| | | 0.100.60 | AATTATCCCCATTCTACATCTGTA | symmetric_CAUCAU-CCCUAC, −4_1- | | |
| | | | GTGAGCAATTCCGTGCTCAGCAAT | 1_mismatch_C-C, −3_1-1_wobble_U-G, | | |
| | | | CTTTGCACCCTACGCAGCATTGGG | 0_1-1_mismatch_A-C, 2_1- | | |
| | | | ATAC | 1_mismatch_C-U, 11_1-1_mismatch_G- | | |
| | | | | G, 15_1-1_mismatch_U-U, 17_1- | | |
| | | | | 1_mismatch_C-U, 34_6- | | |
| | | | | 6_internal_loop-symmetric_AAACAU- | | |
| | | | | UCCAAA | | |
| 2913 | 82A-82B | 610 (−18, +34) | AAACCCTGGTGTGCCCTCTGTCCA | −18_6-6_internal_loop- | −18 | 34 |
| | | 0.100.60 | AATTATCCCCATTCTACATCTGTA | symmetric_UCAUUG-GUCCCU, −4_1- | | |
| | | | GTGAGCAATTCCGTGCTCAGCAAT | 1_mismatch_C-C, −3_1-1_wobble_U-G, | | |
| | | | CTTTGGTCCCTTGGCAGCATTGGG | 0_1-1_mismatch_A-C, 2_1- | | |
| | | | ATAC | 1_mismatch_C-U, 11_1-1_mismatch_G- | | |
| | | | | G, 15_1-1_mismatch_U-U, 17_1- | | |
| | | | | 1_mismatch_C-U, 34_6- | | |
| | | | | 6_internal_loop-symmetric_AAACAU- | | |
| | | | | UCCAAA | | |
| 2914 | 82A-82B | 610 (−16, +34) | AAACCCTGGTGTGCCCTCTGTCCA | −16_6-6_internal_loop- | −16 | 34 |
| | | 0.100.60 | AATTATCCCCATTCTACATCTGTA | symmetric_AUUGCA-ACGUCC, −4_1- | | |
| | | | GTGAGCAATTCCGTGCTCAGCAAT | 1_mismatch_C-C, −3_1-1_wobble_U-G, | | |
| | | | CTTACGTCCGATGGCAGCATTGGG | 0_1-1_mismatch_A-C, 2_1- | | |
| | | | ATAC | 1_mismatch_C-U, 11_1-1_mismatch_G- | | |
| | | | | G, 15_1-1_mismatch_U-U, 17_1- | | |
| | | | | 1_mismatch_C-U, 34_6- | | |
| | | | | 6_internal_loop-symmetric_AAACAU- | | |
| | | | | UCCAAA | | |
| 2902 | 82A-82B | 610 (−14, +34) | AAACCCTGGTGTGCCCTCTGTCCA | −14_6-6_internal_loop- | −14 | 34 |
| | | 0.100.60 | AATTATCCCCATTCTACATCTGTA | symmetric_UGCAAA-AAACGU, −4_1- | | |
| | | | GTGAGCAATTCCGTGCTCAGCAAT | 1_mismatch_C-C, −3_1-1_wobble_U-G, | | |
| | | | CAAACGTATGATGGCAGCATTGG | 0_1-1_mismatch_A-C, 2_1- | | |
| | | | GATAC | 1_mismatch_C-U, 11_1-1_mismatch_G- | | |
| | | | | G, 15_1-1_mismatch_U-U, 17_1- | | |
| | | | | 1_mismatch_C-U, 34_6- | | |
| | | | | 6_internal_loop-symmetric_AAACAU- | | |
| | | | | UCCAAA | | |
| 2915 | 82A-82B | 610 (−12, +34) | AAACCCTGGTGTGCCCTCTGTCCA | −12_6-6_internal_loop- | −12 | 34 |
| | | 0.100.60 | AATTATCCCCATTCTACATCTGTA | symmetric_CAAAGA-AGAAAC, −4_1- | | |
| | | | GTGAGCAATTCCGTGCTCAGCAAA | 1_mismatch_C-C, −3_1-1_wobble_U-G, | | |
| | | | GAAACCAATGATGGCAGCATTGG | 0_1-1_mismatch_A-C, 2_1- | | |
| | | | GATAC | 1_mismatch_C-U, 11_1-1_mismatch_G- | | |
| | | | | G, 15_1-1_mismatch_U-U, 17_1- | | |
| | | | | 1_mismatch_C-U, 34_6- | | |
| | | | | 6_internal_loop-symmetric_AAACAU- | | |
| | | | | UCCAAA | | |
| 2916 | 82A-82B | 610 (−10, +34) | AAACCCTGGTGTGCCCTCTGTCCA | −0_6-6_internal_loop- | −10 | 34 |
| | | 0.100.60 | AATTATCCCCATTCTACATCTGTA | symmetric_AAGAUU-UCAGAA, −4_1- | | |
| | | | GTGAGCAATTCCGTGCTCAGCTCA | 1_mismatch_C-C, −3_1-1_wobble_U-G, | | |
| | | | GAATGCAATGATGGCAGCATTGG | 0_1-1_mismatch_A-C, 2_1- | | |
| | | | GATAC | 1_mismatch_C-U, 11_1-1_mismatch_G- | | |
| | | | | G, 15_1-1_mismatch_U-U, 17_1- | | |
| | | | | 1_mismatch_C-U, 34_6- | | |
| | | | | 6_internal_loop-symmetric_AAACAU- | | |
| | | | | UCCAAA | | |
| 2917 | 83A-83B | 610 (−10, +34) | AAACCCTGGTGTGCCCTCTGTCCA | −0_6-6_internal_loop- | −10 | 34 |
| | | 0.90.60 | AATTATCCCCATTCTACATCTGTA | symmetric_AAGAUU-UCAGAA, −4_1- | | |
| | | | GTGAGCAATTCCGTGCTCAGCTCA | 1_mismatch_C-C, -3_1-1_wobble_U-G, | | |
| | | | GAATGCAATGATGGCAGC | 0_1-1_mismatch_A-C, 2_1- | | |
| | | | | 1_mismatch_C-U, 11_1-1_mismatch_G- | | |
| | | | | G, 15_1-1_mismatch_U-U, 17_1- | | |
| | | | | 1_mismatch_C-U, 34_6- | | |
| | | | | 6_internal_loop-symmetric_AAACAU- | | |
| | | | | UCCAAA | | |
| 2918 | 83A-83B | 610 (−10, +34) | AAACCCTGGTGTGCCCTCTGTCCA | −10_6-6_internal_loop- | −10 | 34 |
| | | 0.92.60 | AATTATCCCCATTCTACATCTGTA | symmetric_AAGAUU-UCAGAA, −4_1- | | |
| | | | GTGAGCAATTCCGTGCTCAGCTCA | 1_mismatch_C-C, −3_1-1_wobble_U-G, | | |
| | | | GAATGCAATGATGGCAGCAT | 0_1-1_mismatch_A-C, 2_1- | | |
| | | | | 1_mismatch_C-U, 11_1-1_mismatch_G- | | |
| | | | | G, 15_1-1_mismatch_U-U, 17_1- | | |
| | | | | 1_mismatch_C-U, 34_6- | | |
| | | | | 6_internal_loop-symmetric_AAACAU- | | |
| | | | | UCCAAA | | |
| 2919 | 83A-83B | 610 (−10, +34) | AAACCCTGGTGTGCCCTCTGTCCA | −10_6-6_internal_loop- | −10 | 34 |
| | | 0.94.60 | AATTATCCCCATTCTACATCTGTA | symmetric_AAGAUU-UCAGAA, −4_1- | | |
| | | | GTGAGCAATTCCGTGCTCAGCTCA | 1_mismatch_C-C, −3_1-1_wobble_U-G, | | |
| | | | GAATGCAATGATGGCAGCATTG | 0_1-1_mismatch_A-C, 2_1- | | |
| | | | | 1_mismatch_C-U, 11_1-1_mismatch_G- | | |
| | | | | G, 15_1-1_mismatch_U-U, 17_1- | | |
| | | | | 1_mismatch_C-U, 34_6- | | |
| | | | | 6_internal_loop-symmetric_AAACAU- | | |
| | | | | UCCAAA | | |
| 2920 | 83A-83B | 610 (−10, +34) | AAACCCTGGTGTGCCCTCTGTCCA | −10_6-6_internal_loop- | −10 | 34 |
| | | 0.96.60 | AATTATCCCCATTCTACATCTGTA | symmetric_AAGAUU-UCAGAA, −4_1- | | |
| | | | GTGAGCAATTCCGTGCTCAGCTCA | 1_mismatch_C-C, −3_1-1_wobble_U-G, | | |
| | | | GAATGCAATGATGGCAGCATTGG | 0_1-1_mismatch_A-C, 2_1- | | |
| | | | G | 1_mismatch_C-U, 11_1-1_mismatch_G- | | |
| | | | | G, 15_1-1_mismatch_U-U, 17_1- | | |
| | | | | 1_mismatch_C-U, 34_6- | | |
| | | | | 6_internal_loop-symmetric_AAACAU- | | |
| | | | | UCCAAA | | |
| 2921 | 83A-83B | 610 (−10, +34) | AAACCCTGGTGTGCCCTCTGTCCA | −10_6-6_internal_loop- | −10 | 34 |
| | | 0.98.60 | AATTATCCCCATTCTACATCTGTA | symmetric_AAGAUU-UCAGAA, −4_1- | | |
| | | | GTGAGCAATTCCGTGCTCAGCTCA | 1_mismatch_C-C, −3_1-1_wobble_U-G, | | |
| | | | GAATGCAATGATGGCAGCATTGG | 0_1-1_mismatch_A-C, 2_1- | | |
| | | | GAT | 1_mismatch_C-U, 11_1-1_mismatch_G- | | |
| | | | | G, 15_1-1_mismatch_U-U, 17_1- | | |
| | | | | 1_mismatch_C-U, 34_6- | | |
| | | | | 6_internal_loop-symmetric_AAACAU- | | |
| | | | | UCCAAA | | |
| 2922 | 83A-83B | 610 (−10, +34) | GTGCCCTCTGTCCAAATTATCCCC | −10_6-6_internal_loop- | −10 | 34 |
| | | 0.90.50 | ATTCTACATCTGTAGTGAGCAATT | symmetric_AAGAUU-UCAGAA, −4_1- | | |
| | | | CCGTGCTCAGCTCAGAATGCAATG | 1_mismatch_C-C, −3_1-1_wobble_U-G, | | |
| | | | ATGGCAGCATTGGGATAC | 0_1-1_mismatch_A-C, 2_1- | | |
| | | | | 1_mismatch_C-U, 11_1-1_mismatch_G- | | |
| | | | | G, 15_1-1_mismatch_U-U, 17_1- | | |
| | | | | 1_mismatch_C-U, 34_6- | | |
| | | | | 6_internal_loop-symmetric_AAACAU- | | |
| | | | | UCCAAA | | |
| 2923 | 83A-83B | 610 (−10, +34) | GTGTGCCCTCTGTCCAAATTATCC | −10_6-6_internal_loop- | −10 | 34 |
| | | 0.92.52 | CCATTCTACATCTGTAGTGAGCAA | symmetric_AAGAUU-UCAGAA, −4_1- | | |
| | | | TTCCGTGCTCAGCTCAGAATGCAA | 1_mismatch_C-C, −3_1-1_wobble_U-G, | | |
| | | | TGATGGCAGCATTGGGATAC | 0_1-1_mismatch_A-C, 2_1- | | |
| | | | | 1_mismatch_C-U, 11_1-1_mismatch_G- | | |
| | | | | G, 15_1-1_mismatch_U-U, 17_1- | | |
| | | | | 1_mismatch_C-U, 34_6- | | |
| | | | | 6_internal_loop-symmetric_AAACAU- | | |
| | | | | UCCAAA | | |
| 2924 | 83A-83B | 610 (−10, +34) | TGGTGTGCCCTCTGTCCAAATTAT | −10 6-6_internal_loop- | −10 | 34 |
| | | 0.94.54 | CCCCATTCTACATCTGTAGTGAGC | symmetric_AAGAUU-UCAGAA, −4_1- | | |
| | | | AATTCCGTGCTCAGCTCAGAATGC | 1_mismatch_C-C, −3_1-1_wobble_U-G, | | |
| | | | AATGATGGCAGCATTGGGATAC | 0_1-1_mismatch_A-C, 2_1- | | |
| | | | | 1_mismatch_C-U, 11_1-1_mismatch_G- | | |
| | | | | G, 15_1-1_mismatch_U-U, 17_1- | | |
| | | | | 1_mismatch_C-U, 34_6- | | |
| | | | | 6_internal_loop-symmetric_AAACAU- | | |
| | | | | UCCAAA | | |
| 2925 | 83A-83B | 610 (−10, +34) | CCTGGTGTGCCCTCTGTCCAAATT | −10_6-6_internal_loop- | −10 | 34 |
| | | 0.96.56 | ATCCCCATTCTACATCTGTAGTGA | symmetric_AAGAUU-UCAGAA, −4_1- | | |
| | | | GCAATTCCGTGCTCAGCTCAGAAT | 1_mismatch_C-C, −3_1-1_wobble_U-G, | | |
| | | | GCAATGATGGCAGCATTGGGATA | 0_1-1_mismatch_A-C, 2_1- | | |
| | | | C | 1_mismatch_C-U, 11 1-1_mismatch_G- | | |
| | | | | G, 15_1-1_mismatch_U-U, 17_1- | | |
| | | | | 1_mismatch_C-U, 34_6- | | |
| | | | | 6_internal_loop-symmetric_AAACAU- | | |
| | | | | UCCAAA | | |
| 2926 | 83A-83B | 610 (−10, +34) | ACCCTGGTGTGCCCTCTGTCCAAA | −10_6-6_internal_loop- | −10 | 34 |
| | | 0.98.58 | TTATCCCCATTCTACATCTGTAGT | symmetric_AAGAUU-UCAGAA, −4_1- | | |
| | | | GAGCAATTCCGTGCTCAGCTCAGA | 1_mismatch_C-C, −3_1-1_wobble_U-G, | | |
| | | | ATGCAATGATGGCAGCATTGGGA | 0_1-1_mismatch_A-C, 2_1- | | |
| | | | TAC | 1_mismatch_C-U, 11_1-1_mismatch_G- | | |
| | | | | G, 15_1-1_mismatch_U-U, 17_1- | | |
| | | | | 1_mismatch_C-U, 34_6- | | |
| | | | | 6_internal_loop-symmetric_AAACAU- | | |
| | | | | UCCAAA | | |
| 2916 | 83A-83B | 610 (−10, +34) | AAACCCTGGTGTGCCCTCTGTCCA | −10_6-6_internal_loop- | −10 | 34 |
| | | 0.100.60 | AATTATCCCCATTCTACATCTGTA | symmetric_AAGAUU-UCAGAA, −4_1- | | |
| | | | GTGAGCAATTCCGTGCTCAGCTCA | 1_mismatch_C-C, −3_1-1_wobble_U-G, | | |
| | | | GAATGCAATGATGGCAGCATTGG | 0_1-1_mismatch_A-C, 2_1- | | |
| | | | GATAC | 1_mismatch_C-U, 11_1-1_mismatch_G- | | |
| | | | | G, 15_1-1_mismatch_U-U, 17_1- | | |
| | | | | 1_mismatch_C-U, 34_6- | | |
| | | | | 6_internal_loop-symmetric_AAACAU- | | |
| | | | | UCCAAA | | |

[0465] FIG. 84-FIG. 113 depict engineering of LRRK2 variants selected through high throughput screening as described above with respect to guide610. TABLE 13 below recites the sequences of the engineered guide RNAs depicted in FIGS. 84-114. While the engineered guide RNA sequences in TABLE 13 are provided as DNA sequences with a T substituted for each U, the corresponding RNA sequences are also encompassed herein.

TABLE 13
Engineered LRRK2 Guide RNA Sequences

| SEQ | | | | | Left | Right |
|---|---|---|---|---|---|---|
| ID | | | | | Barbell | Barbell |
| NO | FIG. | Guide Name | Sequence | Structural Features (target/guide) | Position | Position |
| 157 | 84A | 2063 (no loops) | CCCTGGTGTGCCCTCTGATG | −49_1-1_wobble_U-G, −8_1- | N/A | N/A |
| | | | TTTTTATCCCCATTCTACAG | 1_mismatch_C-U, −3_1-1_wobble_U-G, | | |
| | | | CAGTAGTGTGCAGTGCCGTG | 0_1-1_mismatch_A-C, 4_1- | | |
| | | | GTCATCAATCTTTGCAATGA | 1_wobble_U-G, 8_1-1_mismatch_U-U, | | |
| | | | TGGCAGCATTGGGATACAGT | 11_1-1_mismatch_G-G | | |
| | | | GTGAAGAGCAGCA | | | |
| 158 | 84B | 2063 (−14, +26) | CCCTGGTGTGCCCTCTGATG | −49_1-1_wobble_U-G, −14_6- | −14 | 26 |
| | | | TTTTTTAGGGGATTCTACAG | 6_internal_loop-symmetric_UGCAAA- | | |
| | | | CAGTAGTGTGCAGTGCCGTG | AAACGU, −8_1-1_mismatch_C-U, | | |
| | | | GTCATCAATCAAACGTATGA | −3_1-1_wobble_U-G, 0_1- | | |
| | | | TGGCAGCATTGGGATACAGT | 1_mismatch_A-C, 4_1-1_wobble_U-G, | | |
| | | | GTGAAGAGCAGCA | 8_1-1_mismatch_U-U, 11_1- | | |
| | | | | 1_mismatch_G-G, 26_6- | | |
| | | | | 6_internal_loop-symmetric_GGGGAU- | | |
| | | | | UAGGGG | | |
| 2917 | 85A | 1590 (no loops) | CCCTGGTGTGCCCTCTGATG | −49_1-1_wobble_U-G, −3_1- | N/A | 6 |
| | | | TTTTTATCCCCATTCTACAA | 1_wobble_U-G, 0_1-1_mismatch_A-C, | | |
| | | | CAGTACGGTGAAGTGCCGT | 4_1-1_wobble_U-G, 6_5- | | |
| | | | GGTCAGCAATCTTTGCAATG | 5_internal_loop-symmetric_GCUCA- | | |
| | | | ATGGCAGCATTGGGATACA | GGUGA, 17_1-1_mismatch_C-A | | |
| | | | GTGTGAAGAGCAGCA | | | |
| 2918 | 85B | 1590 (−14, +26) | CCCTGGTGTGCCCTCTGATG | −49_1-1_wobble_U-G, −14_6- | −14 | 26 |
| | | | TTTTTTAGGGGATTCTACAA | 6_internal_loop-symmetric_UGCAAA- | | |
| | | | CAGTACGGTGAAGTGCCGT | AAACGU, −3_1-1_wobble_U-G, 0_1- | | |
| | | | GGTCAGCAATCAAACGTAT | 1_mismatch_A-C, 4_1-1_wobble_U-G, | | |
| | | | GATGGCAGCATTGGGATAC | 6_5-5_internal_loop- | | |
| | | | AGTGTGAAGAGCAGCA | symmetric_GCUCA-GGUGA, 17_1- | | |
| | | | | 1_mismatch_C-A, 26_6- | | |
| | | | | 6_internal_loop-symmetric_GGGGAU- | | |
| | | | | UAGGGG | | |
| 2919 | 86A | 2397 (no loops) | CCCTGGTGTGCCCTCTGATG | −49_1-1_wobble_U-G, −3_1- | N/A | N/A |
| | | | TTTTTATCCCCATTCTACCGC | 1_wobble_U-G, 0_1-1_mismatch_A-C, | | |
| | | | TGTGCTGGGCAATCCCGTGG | 2_1-1_mismatch_C-C, 8_1- | | |
| | | | TCAGCAATCTTTGCAATGAT | 1_wobble_U-G, 12_1-1_wobble_U-G, | | |
| | | | GGCAGCATTGGGATACAGT | 15_1-1_mismatch_U-U, 18_1- | | |
| | | | GTGAAGAGCAGCA | 1_mismatch_U-C | | |
| 2920 | 86B | 2397 (−14, +26) | CCCTGGTGTGCCCTCTGATG | −49_1-1_wobble_U-G, −14 6- | −14 | 26 |
| | | | TTTTTTAGGGGATTCTACCG | 6_internal_loop-symmetric_UGCAAA- | | |
| | | | CTGTGCTGGGCAATCCCGTG | AAACGU, −3_1-1_wobble_U-G, 0_1- | | |
| | | | GTCAGCAATCAAACGTATG | 1_mismatch_A-C, 2_1-1_mismatch_C- | | |
| | | | ATGGCAGCATTGGGATACA | C, 8_1-1_wobble_U-G, 12_1- | | |
| | | | GTGTGAAGAGCAGCA | 1_wobble_U-G, 15_1-1_mismatch_U-U, | | |
| | | | | 18_1-1_mismatch_U-C, 26_6- | | |
| | | | | 6_internal_loop-symmetric_GGGGAU- | | |
| | | | | UAGGGG | | |
| 2921 | 86C | 2397 (−20, +26) | CCCTGGTGTGCCCTCTGATG | −49_1-1_wobble_U-G, −20_6- | −20 | 26 |
| | | | TTTTTTAGGGGATTCTACCG | 6_internal_loop-symmetric_CAUCAU- | | |
| | | | CTGTGCTGGGCAATCCCGTG | UACUAC, −3_1-1_wobble_U-G, 0_1- | | |
| | | | GTCAGCAATCTTTGCATACT | 1_mismatch_A-C, 2_1-1_mismatch_C- | | |
| | | | ACGCAGCATTGGGATACAG | C, 8_1-1_wobble_U-G, 12_1- | | |
| | | | TGTGAAGAGCAGCA | 1_wobble_U-G, 15_1-1_mismatch_U-U, | | |
| | | | | 18_1-1_mismatch_U-C, 26_6- | | |
| | | | | 6_internal_loop-symmetric_GGGGAU- | | |
| | | | | UAGGGG | | |
| 2922 | 87A-87C | 2397 (−14, +26) | AACTTCAGGTGCACGAAAC | -14_6-6_internal_loop- | −14 | 26 |
| | | 0.100.75 | CCTGGTGTGCCCTCTGATGT | symmetric_UGCAAA-AAACGU, −3_1- | | |
| | | | TTTTTAGGGGATTCTACCGC | 1_wobble_U-G, 0_1-1_mismatch_A-C, | | |
| | | | TGTGCTGGGCAATCCCGTGG | 2_1-1_mismatch_C-C, 8_1- | | |
| | | | TCAGCAATCAAACGTATGAT | 1_wobble_U-G, 12_1-1_wobble_U-G, | | |
| | | | G | 15_1-1_mismatch_U-U, 18_1- | | |
| | | | | 1_mismatch_U-C, 26_6- | | |
| | | | | 6_internal_loop-symmetric_GGGGAU- | | |
| | | | | UAGGGG | | |
| 2923 | 87A-87C | 2397 (−14, +26) | CAGGTGCACGAAACCCTGG | -14_6-6_internal_loop- | −14 | 26 |
| | | 0.100.70 | TGTGCCCTCTGATGTTTTTTA | symmetric_UGCAAA-AAACGU, −3_1- | | |
| | | | GGGGATTCTACCGCTGTGCT | 1_wobble_U-G, 0_1-1_mismatch_A-C, | | |
| | | | GGGCAATCCCGTGGTCAGC | 2_1-1_mismatch_C-C, 8_1- | | |
| | | | AATCAAACGTATGATGGCA | 1_wobble_U-G, 12_1-1_wobble_U-G, | | |
| | | | GC | 15_1-1_mismatch_U-U, 18_1- | | |
| | | | | 1_mismatch_U-C, 26_6- | | |
| | | | | 6_internal_loop-symmetric_GGGGAU- | | |
| | | | | UAGGGG | | |
| 2924 | 87A-87C | 2397 (−14, +26) | GCACGAAACCCTGGTGTGCC | -14_6-6_internal_loop- | −14 | 26 |
| | | 0.100.65 | CTCTGATGTTTTTTAGGGGA | symmetric_UGCAAA-AAACGU, −3_1- | | |
| | | | TTCTACCGCTGTGCTGGGCA | 1_wobble_U-G, 0_1-1_mismatch_A-C, | | |
| | | | ATCCCGTGGTCAGCAATCAA | 2_1-1_mismatch_C-C, 8_1- | | |
| | | | ACGTATGATGGCAGCATTGG | 1_wobble_U-G, 12_1-1_wobble_U-G, | | |
| | | | | 15_1-1_mismatch_U-U, 18_1- | | |
| | | | | 1_mismatch_U-C, 26_6- | | |
| | | | | 6_internal_loop-symmetric_GGGGAU- | | |
| | | | | UAGGGG | | |
| 2925 | 87A-87C | 2397 (−14, +26) | AAACCCTGGTGTGCCCTCTG | -14_6-6_internal_loop- | −14 | 26 |
| | | 0.100.60 | ATGTTTTTTAGGGGATTCTA | symmetric_UGCAAA-AAACGU, −3_1- | | |
| | | | CCGCTGTGCTGGGCAATCCC | 1_wobble_U-G, 0_1-1_mismatch_A-C, | | |
| | | | GTGGTCAGCAATCAAACGT | 2_1-1_mismatch_C-C, 8_1- | | |
| | | | ATGATGGCAGCATTGGGAT | 1_wobble_U-G, 12_1-1_wobble_U-G, | | |
| | | | AC | 15_1-1_mismatch_U-U, 18_1- | | |
| | | | | 1_mismatch_U-C, 26_6- | | |
| | | | | 6_internal_loop-symmetric_GGGGAU- | | |
| | | | | UAGGGG | | |
| 2926 | 87A-87C | 2397 (−14, +26) | CTGGTGTGCCCTCTGATGTT | -14_6-6_internal_loop- | −14 | 26 |
| | | 0.100.55 | TTTTAGGGGATTCTACCGCT | symmetric_UGCAAA-AAACGU, −3_1- | | |
| | | | GTGCTGGGCAATCCCGTGGT | 1_wobble_U-G, 0_1-1_mismatch_A-C, | | |
| | | | CAGCAATCAAACGTATGAT | 2_1-1_mismatch_C-C, 8_1- | | |
| | | | GGCAGCATTGGGATACAGT | 1_wobble_U-G, 12_1-1_wobble_U-G, | | |
| | | | GT | 15_1-1_mismatch_U-U, 18_1- | | |
| | | | | 1_mismatch_U-C, 26_6- | | |
| | | | | 6_internal_loop-symmetric_GGGGAU- | | |
| | | | | UAGGGG | | |
| 2927 | 87A-87C | 2397 (−14, +26) | GTGCCCTCTGATGTTTTTTA | -14_6-6_internal_loop- | −14 | 26 |
| | | 0.100.50 | GGGGATTCTACCGCTGTGCT | symmetric_UGCAAA-AAACGU, −3_1- | | |
| | | | GGGCAATCCCGTGGTCAGC | 1_wobble_U-G, 0_1-1_mismatch_A-C, | | |
| | | | AATCAAACGTATGATGGCA | 2_1-1_mismatch_C-C, 8_1- | | |
| | | | GCATTGGGATACAGTGTGA | 1_wobble_U-G, 12_1-1_wobble_U-G, | | |
| | | | AAA | 15_1-1_mismatch_U-U, 18_1- | | |
| | | | | 1_mismatch_U-C, 26_6- | | |
| | | | | 6_internal_loop-symmetric_GGGGAU- | | |
| | | | | UAGGGG | | |
| 2928 | 87A-87C | 2397 (−14, +26) | CCCTGGTGTGCCCTCTGATG | −49_1-1_wobble_U-G, −14_6- | −14 | 26 |
| | | 0.113.57 | TTTTTTAGGGGATTCTACCG | 6_internal_loop-symmetric_UGCAAA- | | |
| | | | CTGTGCTGGGCAATCCCGTG | AAACGU, -3_1-1_wobble_U-G, 0_1- | | |
| | | | GTCAGCAATCAAACGTATG | 1_mismatch_A-C, 2_1-1_mismatch_C- | | |
| | | | ATGGCAGCATTGGGATACA | C, 8_1-1_wobble_U-G, 12_1- | | |
| | | | GTGTGAAGAGCAGCA | 1_wobble_U-G, 15_1-1_mismatch_U-U, | | |
| | | | | 18_1-1_mismatch_U-C, 26_6- | | |
| | | | | 6_internal_loop-symmetric_GGGGAU- | | |
| | | | | UAGGGG | | |
| 2929 | 88A-88C | 2397 (−14, +30) | GTGCCCTCTGATGTAAAATA | -14_6-6_internal_loop- | −14 | 30 |
| | | 0.100.50 | CCCCATTCTACCGCTGTGCT | symmetric_UGCAAA-AAACGU, -3_1- | | |
| | | | GGGCAATCCCGTGGTCAGC | 1_wobble_U-G, 0_1-1_mismatch_A-C, | | |
| | | | AATCAAACGTATGATGGCA | 2_1-1_mismatch_C-C, 8_1- | | |
| | | | GCATTGGGATACAGTGTGA | 1_wobble_U-G, 12_1-1_wobble_U-G, | | |
| | | | AAA | 15_1-1_mismatch_U-U, 18_1- | | |
| | | | | 1_mismatch_U-C, 30_6- | | |
| | | | | 6_internal_loop-symmetric_AUAAAA- | | |
| | | | | AAAAUA | | |
| 2930 | 88A-88C | 2397 (−14, +28) | GTGCCCTCTGATGTTTAATA | -14_6-6_internal_loop- | −14 | 28 |
| | | 0.100.50 | GGCCATTCTACCGCTGTGCT | symmetric_UGCAAA-AAACGU, -3_1- | | |
| | | | GGGCAATCCCGTGGTCAGC | 1_wobble_U-G, 0_1-1_mismatch_A-C, | | |
| | | | AATCAAACGTATGATGGCA | 2_1-1_mismatch_C-C, 8_1- | | |
| | | | GCATTGGGATACAGTGTGA | 1_wobble_U-G, 12_1-1_wobble_U-G, | | |
| | | | AAA | 15_1-1_mismatch_U-U, 18_1- | | |
| | | | | 1_mismatch_U-C, 28_6- | | |
| | | | | 6_internal_loop-symmetric_GGAUAA- | | |
| | | | | AAUAGG | | |
| 2931 | 88A-88C | 2397 (−14, +26) | GTGCCCTCTGATGTTTTTTA | -14_6-6_internal_loop- | −14 | 26 |
| | | 0.100.50 | GGGGATTCTACCGCTGTGCT | symmetric_UGCAAA-AAACGU, -3_1- | | |
| | | | GGGCAATCCCGTGGTCAGC | 1_wobble_U-G, 0_1-1_mismatch_A-C, | | |
| | | | AATCAAACGTATGATGGCA | 2_1-1_mismatch_C-C, 8_1- | | |
| | | | GCATTGGGATACAGTGTGA | 1_wobble_U-G, 12_1-1_wobble_U-G, | | |
| | | | AAA | 15_1-1_mismatch_U-U, 18_1- | | |
| | | | | 1_mismatch_U-C, 26_6- | | |
| | | | | 6_internal_loop-symmetric_GGGGAU- | | |
| | | | | UAGGGG | | |
| 2932 | 88A-88C | 2397 (−14, +25) | GTGCCCTCTGATGTTTTTAA | -14_6-6_internal_loop- | −14 | 25 |
| | | 0.100.50 | GGGGTTTCTACCGCTGTGCT | symmetric_UGCAAA-AAACGU, -3_1- | | |
| | | | GGGCAATCCCGTGGTCAGC | 1_wobble_U-G, 0_1-1_mismatch_A-C, | | |
| | | | AATCAAACGTATGATGGCA | 2_1-1_mismatch_C-C, 8_1- | | |
| | | | GCATTGGGATACAGTGTGA | 1_wobble_U-G, 12_1-1_wobble_U-G, | | |
| | | | AAA | 15_1-1_mismatch_U-U, 18_1- | | |
| | | | | 1_mismatch_U-C, 25_6- | | |
| | | | | 6_internal_loop-symmetric_UGGGGA- | | |
| | | | | AGGGGU | | |
| 2933 | 88A-88C | 2397 (−14, +23) | GTGCCCTCTGATGTTTTTAT | -14_6-6_internal_loop- | −14 | 23 |
| | | 0.100.50 | CGGGTCACTACCGCTGTGCT | symmetric_UGCAAA-AAACGU, -3_1- | | |
| | | | GGGCAATCCCGTGGTCAGC | 1_wobble_U-G, 0_1-1_mismatch_A-C, | | |
| | | | AATCAAACGTATGATGGCA | 2_1-1_mismatch_C-C, 8_1- | | |
| | | | GCATTGGGATACAGTGTGA | 1_wobble_U-G, 12_1-1_wobble_U-G, | | |
| | | | AAA | 15_1-1_mismatch_U-U, 18_1- | | |
| | | | | 1_mismatch_U-C, 23_6- | | |
| | | | | 6_internal_loop-symmetric_AAUGGG- | | |
| | | | | GGGUCA | | |
| 2934 | 88A-88C | 2397 (−14, +22) | GTGCCCTCTGATGTTTTTAT | -14_6-6_internal_loop- | −14 | 22 |
| | | 0.100.50 | CCGGTCAGTACCGCTGTGCT | symmetric_UGCAAA-AAACGU, -3_1- | | |
| | | | GGGCAATCCCGTGGTCAGC | 1_wobble_U-G, 0_1-1_mismatch_A-C, | | |
| | | | AATCAAACGTATGATGGCA | 2_1-1_mismatch_C-C, 8_1- | | |
| | | | GCATTGGGATACAGTGTGA | 1_wobble_U-G, 12_1-1_wobble_U-G, | | |
| | | | AAA | 15_1-1_mismatch_U-U, 18_1- | | |
| | | | | 1_mismatch_U-C, 22_6- | | |
| | | | | 6_internal_loop-symmetric_GAAUGG- | | |
| | | | | GGUCAG | | |
| 2935 | 88A-88C | 2397 (−14, +21) | GTGCCCTCTGATGTTTTTAT | -14_6-6_internal_loop- | −14 | 21 |
| | | 0.100.50 | CCCGTCAGAACCGCTGTGCT | symmetric_UGCAAA-AAACGU, -3_1- | | |
| | | | GGGCAATCCCGTGGTCAGC | 1_wobble_U-G, 0_1-1_mismatch_A-C, | | |
| | | | AATCAAACGTATGATGGCA | 2_1-1_mismatch_C-C, 8_1- | | |
| | | | GCATTGGGATACAGTGTGA | 1_wobble_U-G, 12_1-1_wobble_U-G, | | |
| | | | AAA | 15_1-1_mismatch_U-U, 18_1- | | |
| | | | | 1_mismatch_U-C, 21_6- | | |
| | | | | 6_internal_loop-symmetric_AGAAUG- | | |
| | | | | GUCAGA | | |
| 2936 | 89 | 2397 (−24, +28) | GTGCCCTCTGATGTTTAATA | -24_6-6_internal_loop- | −24 | 28 |
| | | 0.100.50 | GGCCATTCTACCGCTGTGCT | symmetric_CUGCCA-ACCGUC, -3_1- | | |
| | | | GGGCAATCCCGTGGTCAGC | 1_wobble_U-G, 0_1-1_mismatch_A-C, | | |
| | | | AATCTTTGCAATGAACCGTC | 2_1-1_mismatch_C-C, 8_1- | | |
| | | | CATTGGGATACAGTGTGAA | 1_wobble_U-G, 12_1-1_wobble_U-G, | | |
| | | | AA | 15_1-1_mismatch_U-U, 18_1- | | |
| | | | | 1_mismatch_U-C, 28_6- | | |
| | | | | 6_internal_loop-symmetric_GGAUAA- | | |
| | | | | AAUAGG | | |
| 2937 | 89 | 2397 (−22, +28) | GTGCCCTCTGATGTTTAATA | -22_6-6_internal_loop- | −22 | 28 |
| | | 0.100.50 | GGCCATTCTACCGCTGTGCT | symmetric_GCCAUC-CUACCG, -3_1- | | |
| | | | GGGCAATCCCGTGGTCAGC | 1_wobble_U-G, 0_1-1_mismatch_A-C, | | |
| | | | AATCTTTGCAATCTACCGAG | 2_1-1_mismatch_C-C, 8_1- | | |
| | | | CATTGGGATACAGTGTGAA | 1_wobble_U-G, 12_1-1_wobble_U-G, | | |
| | | | AA | 15_1-1_mismatch_U-U, 18_1- | | |
| | | | | 1_mismatch_U-C, 28_6- | | |
| | | | | 6_internal_loop-symmetric_GGAUAA- | | |
| | | | | AAUAGG | | |
| 2938 | 89 | 2397 (−20, +28) | GTGCCCTCTGATGTTTAATA | −20_6-6_internal_loop- | −20 | 28 |
| | | 0.100.50 | GGCCATTCTACCGCTGTGCT | symmetric_CAUCAU-UACUAC, -3_1- | | |
| | | | GGGCAATCCCGTGGTCAGC | 1_wobble_U-G, 0_1-1_mismatch_A-C, | | |
| | | | AATCTTTGCATACTACGCAG | 2_1-1_mismatch_C-C, 8_1- | | |
| | | | CATTGGGATACAGTGTGAA | 1_wobble_U-G, 12_1-1_wobble_U-G, | | |
| | | | AA | 15_1-1_mismatch_U-U, 18_1- | | |
| | | | | 1_mismatch_U-C, 28_6- | | |
| | | | | 6_internal_loop-symmetric_GGAUAA- | | |
| | | | | AAUAGG | | |
| 2939 | 89 | 2397 (−18, +28) | GTGCCCTCTGATGTTTAATA | -18_6-6_internal_loop- | −18 | 28 |
| | | 0.100.50 | GGCCATTCTACCGCTGTGCT | symmetric_UCAUUG-GUUACU, -3_1- | | |
| | | | GGGCAATCCCGTGGTCAGC | 1_wobble_U-G, 0_1-1_mismatch_A-C, | | |
| | | | AATCTTTGGTTACTTGGCAG | 2_1-1_mismatch_C-C, 8_1- | | |
| | | | CATTGGGATACAGTGTGAA | 1_wobble_U-G, 12_1-1_wobble_U-G, | | |
| | | | AA | 15_1-1_mismatch_U-U, 18_1- | | |
| | | | | 1_mismatch_U-C, 28_6- | | |
| | | | | 6_internal_loop-symmetric_GGAUAA- | | |
| | | | | AAUAGG | | |
| 2940 | 89 | 2397 (−16, +28) | GTGCCCTCTGATGTTTAATA | -16_6-6_internal_loop- | −16 | 28 |
| | | 0.100.50 | GGCCATTCTACCGCTGTGCT | symmetric_AUUGCA-ACGUUA, -3_1- | | |
| | | | GGGCAATCCCGTGGTCAGC | 1_wobble_U-G, 0_1-1_mismatch_A-C, | | |
| | | | AATCTTACGTTAGATGGCAG | 2_1-1_mismatch_C-C, 8_1- | | |
| | | | CATTGGGATACAGTGTGAA | 1_wobble_U-G, 12_1-1_wobble_U-G, | | |
| | | | AA | 15_1-1_mismatch_U-U, 18_1- | | |
| | | | | 1_mismatch_U-C, 28_6- | | |
| | | | | 6_internal_loop-symmetric_GGAUAA- | | |
| | | | | AAUAGG | | |
| 2930 | 89 | 2397 (−14, +28) | GTGCCCTCTGATGTTTAATA | -14_6-6_internal_loop- | −14 | 28 |
| | | 0.100.50 | GGCCATTCTACCGCTGTGCT | symmetric_UGCAAA-AAACGU, -3_1- | | |
| | | | GGGCAATCCCGTGGTCAGC | 1_wobble_U-G, 0_1-1_mismatch_A-C, | | |
| | | | AATCAAACGTATGATGGCA | 2_1-1_mismatch_C-C, 8_1- | | |
| | | | GCATTGGGATACAGTGTGA | 1_wobble_U-G, 12_1-1_wobble_U-G, | | |
| | | | AAA | 15_1-1_mismatch_U-U, 18_1- | | |
| | | | | 1_mismatch_U-C, 28_6- | | |
| | | | | 6_internal_loop-symmetric_GGAUAA- | | |
| | | | | AAUAGG | | |
| 2942 | 89 | 2397 (−12, +28) | GTGCCCTCTGATGTTTAATA | -12_6-6_internal_loop- | −12 | 28 |
| | | 0.100.50 | GGCCATTCTACCGCTGTGCT | symmetric_CAAAGA-AGAAAC, -3_1- | | |
| | | | GGGCAATCCCGTGGTCAGC | 1_wobble_U-G, 0_1-1_mismatch_A-C, | | |
| | | | AAAGAAACCAATGATGGCA | 2_1-1_mismatch_C-C, 8_1- | | |
| | | | GCATTGGGATACAGTGTGA | 1_wobble_U-G, 12_1-1_wobble_U-G, | | |
| | | | AAA | 15_1-1_mismatch_U-U, 18_1- | | |
| | | | | 1_mismatch_U-C, 28_6- | | |
| | | | | 6_internal_loop-symmetric_GGAUAA- | | |
| | | | | AAUAGG | | |
| 2943 | 89 | 2397 (−10, +28) | GTGCCCTCTGATGTTTAATA | -10_6-6_internal_loop- | −10 | 28 |
| | | 0.100.50 | GGCCATTCTACCGCTGTGCT | symmetric_AAGAUU-UCAGAA, -3_1- | | |
| | | | GGGCAATCCCGTGGTCAGCT | 1_wobble_U-G, 0_1-1_mismatch_A-C, | | |
| | | | CAGAATGCAATGATGGCAG | 2_1-1_mismatch_C-C, 8_1- | | |
| | | | CATTGGGATACAGTGTGAA | 1_wobble_U-G, 12_1-1_wobble_U-G, | | |
| | | | AA | 15_1-1_mismatch_U-U, 18_1- | | |
| | | | | 1_mismatch_U-C, 28_6- | | |
| | | | | 6_internal_loop-symmetric_GGAUAA- | | |
| | | | | AAUAGG | | |
| 2944 | 89 | 2397 (−9, +28) | GTGCCCTCTGATGTTTAATA | -9_6-6_internal_loop- | −9 | 28 |
| | | 0.100.50 | GGCCATTCTACCGCTGTGCT | symmetric_AGAUUG-GUCAGA, -3_1- | | |
| | | | GGGCAATCCCGTGGTCAGGT | 1_wobble_U-G, 0_1-1_mismatch_A-C, | | |
| | | | CAGATTGCAATGATGGCAG | 2_1-1_mismatch_C-C, 8_1- | | |
| | | | CATTGGGATACAGTGTGAA | 1_wobble_U-G, 12_1-1_wobble_U-G, | | |
| | | | AA | 15_1-1_mismatch_U-U, 18_1- | | |
| | | | | 1_mismatch_U-C, 28_6- | | |
| | | | | 6_internal_loop-symmetric_GGAUAA- | | |
| | | | | AAUAGG | | |
| 2945 | 89 | 2397 (−7, +28) | GTGCCCTCTGATGTTTAATA | -7_6-6_internal_loop- | −7 | 28 |
| | | 0.100.50 | GGCCATTCTACCGCTGTGCT | symmetric_AUUGCU-UCGUCA, -3_1- | | |
| | | | GGGCAATCCCGTGGTCTCGT | 1_wobble_U-G, 0_1-1_mismatch_A-C, | | |
| | | | CACTTTGCAATGATGGCAGC | 2_1-1_mismatch_C-C, 8_1- | | |
| | | | ATTGGGATACAGTGTGAAA | 1_wobble_U-G, 12_1-1_wobble_U-G, | | |
| | | | A | 15_1-1_mismatch_U-U, 18_1- | | |
| | | | | 1_mismatch_U-C, 28_6- | | |
| | | | | 6_internal_loop-symmetric_GGAUAA- | | |
| | | | | AAUAGG | | |
| 2946 | 90A | 1321 (no loops) | CCCTGGTGTGCCCTCTGATG | −49_1-1_wobble_U-G, -7_1- | N/A | N/A |
| | | | TTTTTATCCCCATTCTAGGG | 1_wobble_U-G, -6_1-1_mismatch_G-G, | | |
| | | | CAGTAGGGTGCACTGCCGTG | -3_1-1_wobble_U-G, 0_1- | | |
| | | | GTGGGCAATCTTTGCAATGA | 1_mismatch_A-C, 4_1-1_mismatch_U- | | |
| | | | TGGCAGCATTGGGATACAGT | C, 8_1-1_mismatch_U-U, 10_2- | | |
| | | | GTGAAGAGCAGCA | 2_bulge-symmetric_AG-GG, 18_1- | | |
| | | | | 1_wobble_U-G, 19_1-1_mismatch_G-G | | |
| 2947 | 90B | 1321 (−14, +26) | CCCTGGTGTGCCCTCTGATG | −49_1-1_wobble_U-G, -14_6- | −14 | 26 |
| | | | TTTTTTAGGGGATTCTAGGG | 6_internal_loop-symmetric_UGCAAA- | | |
| | | | CAGTAGGGTGCACTGCCGTG | AAACGU, -7_1-1_wobble_U-G, -6_1- | | |
| | | | GTGGGCAATCAAACGTATG | 1_mismatch_G-G, -3_1-1_wobble_U-G, | | |
| | | | ATGGCAGCATTGGGATACA | 0_1-1_mismatch_A-C, 4_1- | | |
| | | | GTGTGAAGAGCAGCA | 1_mismatch_U-C, 8_1-1_mismatch_U- | | |
| | | | | U, 10_2-2_bulge-symmetric_AG-GG, | | |
| | | | | 18_1-1_wobble_U-G, 19_1- | | |
| | | | | 1_mismatch_G-G, 26_6- | | |
| | | | | 6_internal_loop-symmetric_GGGGAU- | | |
| | | | | UAGGGG | | |
| 2948 | 91A | 295 (no loops) | CCCTGGTGTGCCCTCTGATG | −49_1-1_wobble_U-G, -4_1- | N/A | N/A |
| | | | TTTTTATCCCCATTCTACAG | 1_mismatch_C-A, -3_1-1_wobble_U-G, | | |
| | | | CAGTCCTGTACAGTGCCGTG | 0_1-1_mismatch_A-C, 4_1- | | |
| | | | ATCAGCAATCTTTGCAATGA | 1_wobble_U-G, 7_2-2_bulge- | | |
| | | | TGGCAGCATTGGGATACAGT | symmetric_CU-UA, 12_1- | | |
| | | | GTGAAGAGCAGCA | 1_mismatch_U-C | | |
| 2949 | 91B | 295 (−14, +26) | CCCTGGTGTGCCCTCTGATG | −49_1-1_wobble_U-G, -14_6- | −14 | 26 |
| | | | TTTTTTAGGGGATTCTACAG | 6_internal_loop-symmetric_UGCAAA- | | |
| | | | CAGTCCTGTACAGTGCCGTG | AAACGU, -4_1-1_mismatch_C-A, | | |
| | | | ATCAGCAATCAAACGTATG | −3_1-1_wobble_U-G, 0_1- | | |
| | | | ATGGCAGCATTGGGATACA | 1_mismatch_A-C, 4_1-1_wobble_U-G, | | |
| | | | GTGTGAAGAGCAGCA | 7_2-2_bulge-symmetric_CU-UA, 12_1- | | |
| | | | | 1_mismatch_U-C, 26_6- | | |
| | | | | 6_internal_loop-symmetric_GGGGAU- | | |
| | | | | UAGGGG | | |
| 2950 | 92A | 730 (no loops) | CCCTGGTGTGCCCTCTGATG | −49_1-1_wobble_U-G, -3_1- | N/A | N/A |
| | | | TTTTTATCCCCCTTCTACAGC | 1_wobble_U-G, 0_1-1_mismatch_A-C, | | |
| | | | AGTAGTGAGTTTTGCCGTGG | 4_2-2_bulge-symmetric_UU-UU, 6_1- | | |
| | | | TCAGCAATCTTTGCAATGAT | 1_wobble_G-U, 11_1-1_mismatch_G-G, | | |
| | | | GGCAGCATTGGGATACAGT | 25_1-1_mismatch_U-C | | |
| | | | GTGAAGAGCAGCA | | | |
| 2951 | 92B | 730 (−14, +26) | CCCTGGTGTGCCCTCTGATG | −49_1-1_wobble_U-G, -14_6- | −14 | 25 |
| | | | TTTTTTAGGGGCTTCTACAG | 6_internal_loop-symmetric_UGCAAA- | | |
| | | | CAGTAGTGAGTTTTGCCGTG | AAACGU, -3_1-1_wobble_U-G, 0_1- | | |
| | | | GTCAGCAATCAAACGTATG | 1_mismatch_A-C, 4_2-2_bulge- | | |
| | | | ATGGCAGCATTGGGATACA | symmetric_UU-UU, 6_1-1_wobble_G- | | |
| | | | GTGTGAAGAGCAGCA | U, 11_1-1_mismatch_G-G, 25_7- | | |
| | | | | 7_internal_loop- | | |
| | | | | symmetric_UGGGGAU-UAGGGGC | | |
| 2952 | 93A | 708 (no loops) | CCCTGGTGTGCCCTCTGATG | −49_1-1_wobble_U-G, -3_1- | N/A | N/A |
| | | | TTTTTATCCCCATTCTACAG | 1_wobble_U-G, 0_1-1_mismatch_A-C, | | |
| | | | CAGTACGGTGCAGTGCCGTG | 4_1-1_wobble_U-G, 8_1- | | |
| | | | GTCAGCAATCTTTGCAATGA | 1_mismatch_U-U, 10_1-1_mismatch_A- | | |
| | | | TGGCAGCATTGGGATACAGT | G | | |
| | | | GTGAAGAGCAGCA | | | |
| 2953 | 93B | 708 (−14, +26) | CCCTGGTGTGCCCTCTGATG | −49_1-1_wobble_U-G, -14_6- | −14 | 26 |
| | | | TTTTTTAGGGGATTCTACAG | 6_internal_loop-symmetric_UGCAAA- | | |
| | | | CAGTACGGTGCAGTGCCGTG | AAACGU, -3_1-1_wobble_U-G, 0_1- | | |
| | | | GTCAGCAATCAAACGTATG | 1_mismatch_A-C, 4_1-1_wobble_U-G, | | |
| | | | ATGGCAGCATTGGGATACA | 8_1-1_mismatch_U-U, 10_1- | | |
| | | | GTGTGAAGAGCAGCA | 1_mismatch_A-G, 26_6- | | |
| | | | | 6_internal_loop-symmetric_GGGGAU- | | |
| | | | | UAGGGG | | |
| 2954 | 94A | 351 (no loops) | CCCTGGTGTGCCCTCTGATG | −49_1-1_wobble_U-G, -3_1- | N/A | N/A |
| | | | TTTTTATCCCCATTCTACAG | 1_wobble_U-G, 0_1-1_mismatch_A-C, | | |
| | | | CGGTACTGAGCAAATCCGTG | 2_2-2_bulge-symmetric_CA-AU, 15_1- | | |
| | | | GTCAGCAATCTTTGCAATGA | 1_wobble_U-G | | |
| | | | TGGCAGCATTGGGATACAGT | | | |
| | | | GTGAAGAGCAGCA | | | |
| 2955 | 94B | 351 (−14, +26) | CCCTGGTGTGCCCTCTGATG | −49_1-1_wobble_U-G, -14_6- | −14 | 26 |
| | | | TTTTTTAGGGGATTCTACAG | 6_internal_loop-symmetric_UGCAAA- | | |
| | | | CGGTACTGAGCAAATCCGTG | AAACGU, -3_1-1_wobble_U-G, 0_1- | | |
| | | | GTCAGCAATCAAACGTATG | 1_mismatch_A-C, 2_2-2_bulge- | | |
| | | | ATGGCAGCATTGGGATACA | symmetric_CA-AU, 15_1-1_wobble_U- | | |
| | | | GTGTGAAGAGCAGCA | G, 26_6-6_internal_loop- | | |
| | | | | symmetric_GGGGAU-UAGGGG | | |
| 2956 | 95A | 1326 (no loops) | CCCTGGTGTGCCCTCTGATG | −49_1-1_wobble_U-G, -4_1- | N/A | N/A |
| | | | TTTTTATCCCCATTCTACACC | 1_mismatch_C-C, 0_1-1_mismatch_A- | | |
| | | | TGGACTGAGAAATCCCGTAC | C, 2_1-1_mismatch_C-C, 6_1- | | |
| | | | TCAGCAATCTTTGCAATGAT | 1_mismatch_G-A, 13_3-3_bulge- | | |
| | | | GGCAGCATTGGGATACAGT | symmetric_ACU-UGG, 17_1- | | |
| | | | GTGAAGAGCAGCA | 1_mismatch_C-C | | |
| 2957 | 95B | 1326 (−14, +26) | CCCTGGTGTGCCCTCTGATG | −49_1-1_wobble_U-G, -14_6- | −14 | 26 |
| | | | TTTTTTAGGGGATTCTACAC | 6_internal_loop-symmetric_UGCAAA- | | |
| | | | CTGGACTGAGAAATCCCGTA | AAACGU, -4_1-1_mismatch_C-C, 0_1- | | |
| | | | CTCAGCAATCAAACGTATGA | 1_mismatch_A-C, 2_1-1_mismatch_C- | | |
| | | | TGGCAGCATTGGGATACAGT | C, 6_1-1_mismatch_G-A, 13_3- | | |
| | | | GTGAAGAGCAGCA | 3_bulge-symmetric_ACU-UGG, 17_1- | | |
| | | | | 1_mismatch_C-C, 26_6- | | |
| | | | | 6_internal_loop-symmetric_GGGGAU- | | |
| | | | | UAGGGG | | |
| 2958 | 96A-96B | 871 (−22, +26) | CCCTGGTGTGCCCTCTGATG | −49_1-1_wobble_U-G, -22_6- | −22 | 26 |
| | | | TTTTTCGAAGAATTCTACAG | 6_internal_loop-symmetric_GCCAUC- | | |
| | | | TAGGACTGAGCACTGCCGA | CAAAAA, -7_1-1_wobble_U-G, -6_1- | | |
| | | | GCTGGGCAATCTTTGCAATC | 1_mismatch_G-G, -4_0-1_bulge- | | |
| | | | AAAAAAGCATTGGGATACA | asymmetric_-C, -2_1-0_bulge- | | |
| | | | GTGTGAAGAGCAGCA | asymmetric_A-, 0_1-1_mismatch_A-C, | | |
| | | | | 4_1-1_mismatch_U-C, 13_1- | | |
| | | | | 1_mismatch_A-G, 16_1-1_wobble_G-U, | | |
| | | | | 26_6-6_internal_loop- | | |
| | | | | symmetric_GGGGAU-CGAAGA | | |
| 2959 | 96C-96D | 871 (−16, +22) | CCCTGGTGTGCCCTCTGATG | −49_1-1_wobble_U-G, -16_6- | −16 | 22 |
| | | | TTTTTATCCGAAACATACAG | 6_internal_loop-symmetric_AUUGCA- | | |
| | | | TAGGACTGAGCACTGCCGA | CUCCCA, -7_1-1_wobble_U-G, -6_1- | | |
| | | | GCTGGGCAATCTTCTCCCAG | 1_mismatch_G-G, -4_0-1_bulge- | | |
| | | | ATGGCAGCATTGGGATACA | asymmetric_-C, -2_1-0_bulge- | | |
| | | | GTGTGAAGAGCAGCA | asymmetric_A-, 0_1-1_mismatch_A-C, | | |
| | | | | 4_1-1_mismatch_U-C, 13_1- | | |
| | | | | 1_mismatch_A-G, 16_1-1_wobble_G-U, | | |
| | | | | 22_6-6_internal_loop- | | |
| | | | | symmetric_GAAUGG-GAAACA | | |
| 2960 | 96E-96F | 871 (−8, +26) | CCCTGGTGTGCCCTCTGATG | −49_1-1_wobble_U-G, -9_4-4_bulge- | N/A | 26 |
| | | | TTTTTTACAGAATTCTACAG | symmetric_AUUG-GUUC, -7_1- | | |
| | | | TAGGACTGAGCACTGCCGA | 1_wobble_U-G, -6_1-1_mismatch_G-G, | | |
| | | | GCTGGGGTTCCTTTGCAATG | -4_0-1_bulge-asymmetric_-C, -2_1- | | |
| | | | ATGGCAGCATTGGGATACA | 0_bulge-asymmetric_A-, 0_1- | | |
| | | | GTGTGAAGAGCAGCA | 1_mismatch_A-C, 4_1-1_mismatch_U- | | |
| | | | | C, 13_1-1_mismatch_A-G, 16_1- | | |
| | | | | 1_wobble_G-U, 26_6-6_internal_loop- | | |
| | | | | symmetric_GGGGAU-UACAGA | | |
| 139 | 96G-96I | 871 (−16, +24) | CCCTGGTGTGCCCTCTGATG | −49_1-1_wobble_U-G, -16_6- | −16 | 24 |
| | | | TTTTTATGGGGTGTCTACAG | 6_internal_loop-symmetric_AUUGCA- | | |
| | | | TAGGACTGAGCACTGCCGA | GAGUCG, -7_1-1_wobble_U-G, -6_1- | | |
| | | | GCTGGGCAATCTTGAGTCGG | 1_mismatch_G-G, -4_0-1_bulge- | | |
| | | | ATGGCAGCATTGGGATACA | asymmetric_-C, -2_1-0_bulge- | | |
| | | | GTGTGAAGAGCAGCA | asymmetric_A-, 0_1-1_mismatch_A-C, | | |
| | | | | 4_1-1_mismatch_U-C, 13_1- | | |
| | | | | 1_mismatch_A-G, 16_1-1_wobble_G-U, | | |
| | | | | 24_6-6_internal_loop- | | |
| | | | | symmetric_AUGGGG-GGGGUG | | |
| 2962 | 96J-96K | 871 (−10, +26) | CCCTGGTGTGCCCTCTGATG | −49_1-1_wobble_U-G, -10_6- | −10 | 26 |
| | | | TTTTTCATGAGATTCTACAG | 6_internal_loop-symmetric_AAGAUU- | | |
| | | | TAGGACTGAGCACTGCCGA | CUCAGG, -7_1-1_wobble_U-G, -6_1- | | |
| | | | GCTGGGCCTCAGGTGCAATG | 1_mismatch_G-G, -4_0-1_bulge- | | |
| | | | ATGGCAGCATTGGGATACA | asymmetric_-C, -2_1-0_bulge- | | |
| | | | GTGTGAAGAGCAGCA | asymmetric_A-, 0_1-1_mismatch_A-C, | | |
| | | | | 4_1-1_mismatch_U-C, 13_1- | | |
| | | | | 1_mismatch_A-G, 16_1-1_wobble_G-U, | | |
| | | | | 26_6-6_internal_loop- | | |
| | | | | symmetric_GGGGAU-CAUGAG | | |
| 2963 | 96L-96M | 871 (−16, +26) | CCCTGGTGTGCCCTCTGATG | −49_1-1_wobble_U-G, -16_6- | −16 | N/A |
| | | | TTTTTCTACAGATTCTACAG | 6_internal_loop-symmetric_AUUGCA- | | |
| | | | TAGGACTGAGCACTGCCGA | CAUUUG, -7_1-1_wobble_U-G, -6_1- | | |
| | | | GCTGGGCAATCTTCATTTGG | 1_mismatch_G-G, -4_0-1_bulge- | | |
| | | | ATGGCAGCATTGGGATACA | asymmetric_-C, -2_1-0_bulge- | | |
| | | | GTGTGAAGAGCAGCA | asymmetric_A-, 0_1-1_mismatch_A-C, | | |
| | | | | 4_1-1_mismatch_U-C, 13_1- | | |
| | | | | 1_mismatch_A-G, 16_1-1_wobble_G-U, | | |
| | | | | 26_2-2_bulge-symmetric_GG-AG, | | |
| | | | | 29_3-3_bulge-symmetric_GAU-CUA | | |
| 2964 | 96N-960 | 871 (−20, +26) | CCCTGGTGTGCCCTCTGATG | −49_1-1_wobble_U-G, −20_6- | −20 | N/A |
| | | | TTCTTTAGGGGATTCTACAG | 6_internal_loop-symmetric_CAUCAU- | | |
| | | | TAGGACTGAGCACTGCCGA | UACUAC, -7_1-1_wobble_U-G, -6_1- | | |
| | | | GCTGGGCAATCTTTGCATAC | 1_mismatch_G-G, -4_0-1_bulge- | | |
| | | | TACGCAGCATTGGGATACA | asymmetric_-C, -2_1-0_bulge- | | |
| | | | GTGTGAAGAGCAGCA | asymmetric_A-, 0_1-1_mismatch_A-C, | | |
| | | | | 4_1-1_mismatch_U-C, 13_1- | | |
| | | | | 1_mismatch_A-G, 16_1-1_wobble_G-U, | | |
| | | | | 26_5-4_internal_loop- | | |
| | | | | asymmetric_GGGGA-GGGG, 34_0- | | |
| | | | | 1_bulge-asymmetric-C | | |
| 2965 | 97A-97C | 871 (−16, +24) | AACTTCAGGTGCACGAAAC | -16_6-6_internal_loop- | −16 | 24 |
| | | 0.100.75 | CCTGGTGTGCCCTCTGATGT | symmetric_AUUGCA-GAGUCG, -7_1- | | |
| | | | TTTTATGGGGTGTCTACAGT | 1_wobble_U-G, -6_1-1_mismatch_G-G, | | |
| | | | AGGACTGAGCACTGCCGAG | -4_0-1_bulge-asymmetric_-C, -2_1- | | |
| | | | CTGGGCAATCTTGAGTCGGA | 0_bulge-asymmetric_A-, 0_1- | | |
| | | | TG | 1_mismatch_A-C, 4_1-1_mismatch_U- | | |
| | | | | C, 13_1-1_mismatch_A-G, 16_1- | | |
| | | | | 1_wobble_G-U, 24_6-6_internal_loop- | | |
| | | | | symmetric_AUGGGG-GGGGUG | | |
| 2966 | 97A-97C | 871 (−16, +24) | CAGGTGCACGAAACCCTGG | -16_6-6_internal_loop- | −16 | 24 |
| | | 0.100.70 | TGTGCCCTCTGATGTTTTTAT | symmetric_AUUGCA-GAGUCG, -7_1- | | |
| | | | GGGGTGTCTACAGTAGGACT | 1_wobble_U-G, -6_1-1_mismatch_G-G, | | |
| | | | GAGCACTGCCGAGCTGGGC | -4_0-1_bulge-asymmetric_-C, -2_1- | | |
| | | | AATCTTGAGTCGGATGGCAG | 0_bulge-asymmetric_A-, 0_1- | | |
| | | | C | 1_mismatch_A-C, 4_1-1_mismatch_U- | | |
| | | | | C, 13_1-1_mismatch_A-G, 16_1- | | |
| | | | | 1_wobble_G-U, 24_6-6_internal_loop- | | |
| | | | | symmetric_AUGGGG-GGGGUG | | |
| 2967 | 97A-97C | 871 (−16, +24) | GCACGAAACCCTGGTGTGCC | -16_6-6_internal_loop- | −16 | 24 |
| | | 0.100.65 | CTCTGATGTTTTTATGGGGT | symmetric_AUUGCA-GAGUCG, -7_1- | | |
| | | | GTCTACAGTAGGACTGAGC | 1_wobble_U-G, -6_1-1_mismatch_G-G, | | |
| | | | ACTGCCGAGCTGGGCAATCT | -4_0-1_bulge-asymmetric_-C, -2_1- | | |
| | | | TGAGTCGGATGGCAGCATTG | 0_bulge-asymmetric_A-, 0_1- | | |
| | | | G | 1_mismatch_A-C, 4_1-1_mismatch_U- | | |
| | | | | C, 13_1-1_mismatch_A-G, 16_1- | | |
| | | | | 1_wobble_G-U, 24_6-6_internal_loop- | | |
| | | | | symmetric_AUGGGG-GGGGUG | | |
| 2968 | 97A-97C | 871 (−16, +24) | AAACCCTGGTGTGCCCTCTG | -16_6-6_internal_loop- | −16 | 24 |
| | | 0.100.60 | ATGTTTTTATGGGGTGTCTA | symmetric_AUUGCA-GAGUCG, -7_1- | | |
| | | | CAGTAGGACTGAGCACTGC | 1_wobble_U-G, -6_1-1_mismatch_G-G, | | |
| | | | CGAGCTGGGCAATCTTGAGT | -4_0-1_bulge-asymmetric_-C, -2_1- | | |
| | | | CGGATGGCAGCATTGGGAT | 0_bulge-asymmetric_A-, 0_1- | | |
| | | | AC | 1_mismatch_A-C, 4_1-1_mismatch_U- | | |
| | | | | C, 13_1-1_mismatch_A-G, 16_1- | | |
| | | | | 1_wobble_G-U, 24_6-6_internal_loop- | | |
| | | | | symmetric_AUGGGG-GGGGUG | | |
| 2969 | 97A-97C | 871 (−16, +24) | CTGGTGTGCCCTCTGATGTT | -16_6-6_internal_loop- | −16 | 24 |
| | | 0.100.55 | TTTATGGGGTGTCTACAGTA | symmetric_AUUGCA-GAGUCG, -7_1- | | |
| | | | GGACTGAGCACTGCCGAGC | 1_wobble_U-G, -6_1-1_mismatch_G-G, | | |
| | | | TGGGCAATCTTGAGTCGGAT | -4_0-1_bulge-asymmetric_- C, -2_1- | | |
| | | | GGCAGCATTGGGATACAGT | 0_bulge-asymmetric_A-, 0_1- | | |
| | | | GT | 1_mismatch_A-C, 4_1-1_mismatch_U- | | |
| | | | | C, 13_1-1_mismatch_A-G, 16_1- | | |
| | | | | 1_wobble_G-U, 24_6-6_internal_loop- | | |
| | | | | symmetric_AUGGGG-GGGGUG | | |
| 2970 | 97A-97C | 871 (−16, +24) | GTGCCCTCTGATGTTTTTAT | -16_6-6_internal_loop- | −16 | 24 |
| | | 0.100.50 | GGGGTGTCTACAGTAGGACT | symmetric_AUUGCA-GAGUCG, -7_1- | | |
| | | | GAGCACTGCCGAGCTGGGC | 1_wobble_U-G, -6_1-1_mismatch_G-G, | | |
| | | | AATCTTGAGTCGGATGGCAG | -4_0-1_bulge-asymmetric_-C, -2_1- | | |
| | | | CATTGGGATACAGTGTGAA | 0_bulge-asymmetric_A-, 0_1- | | |
| | | | AA | 1_mismatch_A-C, 4_1-1_mismatch_U- | | |
| | | | | C, 13_1-1_mismatch_A-G, 16_1- | | |
| | | | | 1_wobble_G-U, 24_6-6_internal_loop- | | |
| | | | | symmetric_AUGGGG-GGGGUG | | |
| 139 | 97A-97C | 871 (−16, +24) | CCCTGGTGTGCCCTCTGATG | −49_1-1_wobble_U-G, -16_6- | −16 | 24 |
| | | 0.113.57 | TTTTTATGGGGTGTCTACAG | 6_internal_loop-symmetric_AUUGCA- | | |
| | | | TAGGACTGAGCACTGCCGA | GAGUCG, -7_1-1_wobble_U-G, -6_1- | | |
| | | | GCTGGGCAATCTTGAGTCGG | 1_mismatch_G-G, -4_0-1_bulge- | | |
| | | | ATGGCAGCATTGGGATACA | asymmetric_-C, -2_1-0_bulge- | | |
| | | | GTGTGAAGAGCAGCA | asymmetric_A-, 0_1-1_mismatch_A-C, | | |
| | | | | 4_1-1_mismatch_U-C, 13_1- | | |
| | | | | 1_mismatch_A-G, 16_1-1_wobble_G-U, | | |
| | | | | 24_6-6_internal_loop- | | |
| | | | | symmetric_AUGGGG-GGGGUG | | |
| 2972 | 98A-98C | 871 (−16, +34) | CTGGTGTGCCCTCTGTACCA | -16_6-6_internal_loop- | −16 | 34 |
| | | 0.100.55 | ATTATCCCCATTCTACAGTA | symmetric_AUUGCA-GAGUCG, -7_1- | | |
| | | | GGACTGAGCACTGCCGAGC | 1_wobble_U-G, -6_1-1_mismatch_G-G, | | |
| | | | TGGGCAATCTTGAGTCGGAT | -4_0-1_bulge-asymmetric_-C, -2_1- | | |
| | | | GGCAGCATTGGGATACAGT | 0_bulge-asymmetric_A-, 0_1- | | |
| | | | GT | 1_mismatch_A-C, 4_1-1_mismatch_U- | | |
| | | | | C, 13_1-1_mismatch_A-G, 16_1- | | |
| | | | | 1_wobble_G-U, 34_6-6_internal_loop- | | |
| | | | | symmetric_AAACAU-UACCAA | | |
| 2973 | 98A-98C | 871 (−16, +32) | CTGGTGTGCCCTCTGATCCA | -16_6-6_internal_loop- | −16 | 32 |
| | | 0.100.55 | AGCATCCCCATTCTACAGTA | symmetric_AUUGCA-GAGUCG, -7_1- | | |
| | | | GGACTGAGCACTGCCGAGC | 1_wobble_U-G, -6_1-1_mismatch_G-G, | | |
| | | | TGGGCAATCTTGAGTCGGAT | -4_0-1_bulge-asymmetric_-C, -2_1- | | |
| | | | GGCAGCATTGGGATACAGT | 0_bulge-asymmetric_A-, 0_1- | | |
| | | | GT | 1_mismatch_A-C, 4_1-1_mismatch_U- | | |
| | | | | C, 13_1-1_mismatch_A-G, 16_1- | | |
| | | | | 1_wobble_G-U, 32_6-6_internal_loop- | | |
| | | | | symmetric_AAAAAC-CCAAGC | | |
| 2974 | 98A-98C | 871 (−16, +30) | CTGGTGTGCCCTCTGATGTA | -16_6-6_internal_loop- | −16 | 30 |
| | | 0.100.55 | AGCTACCCCATTCTACAGTA | symmetric_AUUGCA-GAGUCG, -7_1- | | |
| | | | GGACTGAGCACTGCCGAGC | 1_wobble_U-G, -6_1-1_mismatch_G-G, | | |
| | | | TGGGCAATCTTGAGTCGGAT | -4_0-1_bulge-asymmetric_-C, -2_1- | | |
| | | | GGCAGCATTGGGATACAGT | 0_bulge-asymmetric_A-, 0_1- | | |
| | | | GT | 1_mismatch_A-C, 4_1-1_mismatch_U- | | |
| | | | | C, 13_1-1_mismatch_A-G, 16_1- | | |
| | | | | 1_wobble_G-U, 30_6-6_internal_loop- | | |
| | | | | symmetric_AUAAAA-AAGCUA | | |
| 2975 | 98A-98C | 871 (−16, +28) | CTGGTGTGCCCTCTGATGTT | -16_6-6_internal_loop- | −16 | 28 |
| | | 0.100.55 | TGCTAGGCCATTCTACAGTA | symmetric_AUUGCA-GAGUCG, -7_1- | | |
| | | | GGACTGAGCACTGCCGAGC | 1_wobble_U-G, -6_1-1_mismatch_G-G, | | |
| | | | TGGGCAATCTTGAGTCGGAT | -4_0-1_bulge-asymmetric_-C, -2_1- | | |
| | | | GGCAGCATTGGGATACAGT | 0_bulge-asymmetric_A-, 0_1- | | |
| | | | GT | 1_mismatch_A-C, 4_1-1_mismatch_U- | | |
| | | | | C, 13_1-1_mismatch_A-G, 16_1- | | |
| | | | | 1_wobble_G-U, 28_6-6_internal_loop- | | |
| | | | | symmetric_GGAUAA-GCUAGG | | |
| 2976 | 98A-98C | 871 (−16, +26) | CTGGTGTGCCCTCTGATGTT | -16_6-6_internal_loop- | −16 | 26 |
| | | 0.100.55 | TTTTAGGGGATTCTACAGTA | symmetric_AUUGCA-GAGUCG, -7_1- | | |
| | | | GGACTGAGCACTGCCGAGC | 1_wobble_U-G, -6_1-1_mismatch_G-G, | | |
| | | | TGGGCAATCTTGAGTCGGAT | -4_0-1_bulge-asymmetric_-C, -2_1- | | |
| | | | GGCAGCATTGGGATACAGT | 0_bulge-asymmetric_A-, 0_1- | | |
| | | | GT | 1_mismatch_A-C, 4_1-1_mismatch_U- | | |
| | | | | C, 13_1-1_mismatch_A-G, 16_1- | | |
| | | | | 1_wobble_G-U, 26_6-6_internal_loop- | | |
| | | | | symmetric_GGGGAU-UAGGGG | | |
| 2977 | 98A-98C | 871 (−16, +24) | CTGGTGTGCCCTCTGATGTT | -16_6-6_internal_loop- | −16 | 24 |
| | | 0.100.55 | TTTATGGGGTGTCTACAGTA | symmetric_AUUGCA-GAGUCG, -7_1- | | |
| | | | GGACTGAGCACTGCCGAGC | 1_wobble_U-G, -6_1-1_mismatch_G-G, | | |
| | | | TGGGCAATCTTGAGTCGGAT | -4_0-1_bulge-asymmetric_-C, -2_1- | | |
| | | | GGCAGCATTGGGATACAGT | 0_bulge-asymmetric_A-, 0_1- | | |
| | | | GT | 1_mismatch_A-C, 4_1-1_mismatch_U- | | |
| | | | | C, 13_1-1_mismatch_A-G, 16_1- | | |
| | | | | 1_wobble_G-U, 24_6-6_internal_loop- | | |
| | | | | symmetric_AUGGGG-GGGGUG | | |
| 2978 | 98A-98C | 871 (−16, +22) | CTGGTGTGCCCTCTGATGTT | -16_6-6_internal_loop- | −16 | 22 |
| | | 0.100.55 | TTTATCCGGTGAGTACAGTA | symmetric_AUUGCA-GAGUCG, -7_1- | | |
| | | | GGACTGAGCACTGCCGAGC | 1_wobble_U-G, -6_1-1_mismatch_G-G, | | |
| | | | TGGGCAATCTTGAGTCGGAT | -4_0-1_bulge-asymmetric_-C, -2_1- | | |
| | | | GGCAGCATTGGGATACAGT | 0_bulge-asymmetric_A-, 0_1- | | |
| | | | GT | 1_mismatch_A-C, 4_1-1_mismatch_U- | | |
| | | | | C, 13_1-1_mismatch_A-G, 16_1- | | |
| | | | | 1_wobble_G-U, 22_6-6_internal_loop- | | |
| | | | | symmetric_GAAUGG-GGUGAG | | |
| 2979 | 98A-98C | 871 (−16, +20) | CTGGTGTGCCCTCTGATGTT | -16_6-6_internal_loop- | −16 | 20 |
| | | 0.100.55 | TTTATCCCCTGAGATCAGTA | symmetric_AUUGCA-GAGUCG, -7_1- | | |
| | | | GGACTGAGCACTGCCGAGC | 1_wobble_U-G, -6_1-1_mismatch_G-G, | | |
| | | | TGGGCAATCTTGAGTCGGAT | -4_0-1_bulge-asymmetric_-C, -2_1- | | |
| | | | GGCAGCATTGGGATACAGT | 0_bulge-asymmetric_A-, 0_1- | | |
| | | | GT | 1_mismatch_A-C, 4_1-1_mismatch_U- | | |
| | | | | C, 13_1-1_mismatch_A-G, 16_1- | | |
| | | | | 1_wobble_G-U, 20_6-6_internal_loop- | | |
| | | | | symmetric_UAGAAU-UGAGAU | | |
| 2980 | 98A-98C | 871 (−16, +18) | CTGGTGTGCCCTCTGATGTT | -16_6-6_internal_loop- | −16 | 18 |
| | | 0.100.55 | TTTATCCCCATAGATGTGTA | symmetric_AUUGCA-GAGUCG, -7_1- | | |
| | | | GGACTGAGCACTGCCGAGC | 1_wobble_U-G, -6_1-1_mismatch_G-G, | | |
| | | | TGGGCAATCTTGAGTCGGAT | -4_0-1_bulge-asymmetric_-C, -2_1- | | |
| | | | GGCAGCATTGGGATACAGT | 0_bulge-asymmetric_A-, 0_1- | | |
| | | | GT | 1_mismatch_A-C, 4_1-1_mismatch_U- | | |
| | | | | C, 13_1-1_mismatch_A-G, 16_1- | | |
| | | | | 1_wobble_G-U, 18_6-6_internal_loop- | | |
| | | | | symmetric_UGUAGA-AGAUGU | | |
| 2981 | 99A-99C | 871 (−30, +32) | CTGGTGTGCCCTCTGATCCA | -30_6-6_internal_loop- | −30 | 32 |
| | | 0.100.55 | AGCATCCCCATTCTACAGTA | symmetric_CCAAUG-GUGACC, -7_1- | | |
| | | | GGACTGAGCACTGCCGAGC | 1_wobble_U-G, -6_1-1_mismatch_G-G, | | |
| | | | TGGGCAATCTTTGCAATGAT | -4_0-1_bulge-asymmetric_-C, -2_1- | | |
| | | | GGCAGGTGACCGATACAGT | 0_bulge-asymmetric_A-, 0_1- | | |
| | | | GT | 1_mismatch_A-C, 4_1-1_mismatch_U- | | |
| | | | | C, 13_1-1_mismatch_A-G, 16_1- | | |
| | | | | 1_wobble_G-U, 32_6-6_internal_loop- | | |
| | | | | symmetric_AAAAAC-CCAAGC | | |
| 2982 | 99A-99C | 871 (−27, +32) | CTGGTGTGCCCTCTGATCCA | -27_6-6_internal_loop- | −27 | 32 |
| | | 0.100.55 | AGCATCCCCATTCTACAGTA | symmetric_AUGCUG-GUCGUG, -7_1- | | |
| | | | GGACTGAGCACTGCCGAGC | 1_wobble_U-G, -6_1-1_mismatch_G-G, | | |
| | | | TGGGCAATCTTTGCAATGAT | -4_0-1_bulge-asymmetric_-C, -2_1- | | |
| | | | GGGTCGTGTGGGATACAGT | 0_bulge-asymmetric_A-, 0_1- | | |
| | | | GT | 1_mismatch_A-C, 4_1-1_mismatch_U- | | |
| | | | | C, 13_1-1_mismatch_A-G, 16_1- | | |
| | | | | 1_wobble_G-U, 32_6-6_internal_loop- | | |
| | | | | symmetric_AAAAAC-CCAAGC | | |
| 2983 | 99A-99C | 871 (−24, +32) | CTGGTGTGCCCTCTGATCCA | -24_6-6_internal_loop- | −24 | 32 |
| | | 0.100.55 | AGCATCCCCATTCTACAGTA | symmetric_CUGCCA-ACCGUC, -7_1- | | |
| | | | GGACTGAGCACTGCCGAGC | 1_wobble_U-G, -6_1-1_mismatch_G-G, | | |
| | | | TGGGCAATCTTTGCAATGAA | -4_0-1_bulge-asymmetric_-C, -2_1- | | |
| | | | CCGTCCATTGGGATACAGTG | 0_bulge-asymmetric_A-, 0_1- | | |
| | | | T | 1_mismatch_A-C, 4_1-1_mismatch_U- | | |
| | | | | C, 13_1-1_mismatch_A-G, 16_1- | | |
| | | | | 1_wobble_G-U, 32_6-6_internal_loop- | | |
| | | | | symmetric_AAAAAC-CCAAGC | | |
| 2984 | 99A-99C | 871 (−22, +32) | CTGGTGTGCCCTCTGATCCA | -22_6-6_internal_loop- | −22 | 32 |
| | | 0.100.55 | AGCATCCCCATTCTACAGTA | symmetric_GCCAUC-CUACCG, -7_1- | | |
| | | | GGACTGAGCACTGCCGAGC | 1_wobble_U-G, -6_1-1_mismatch_G-G, | | |
| | | | TGGGCAATCTTTGCAATCTA | -4_0-1_bulge-asymmetric_-C, -2_1- | | |
| | | | CCGAGCATTGGGATACAGT | 0_bulge-asymmetric_A-, 0_1- | | |
| | | | GT | 1_mismatch_A-C, 4_1-1_mismatch_U- | | |
| | | | | C, 13_1-1_mismatch_A-G, 16_1- | | |
| | | | | 1_wobble_G-U, 32_6-6_internal_loop- | | |
| | | | | symmetric_AAAAAC-CCAAGC | | |
| 2985 | 99A-99C | 871 (−20, +32) | CTGGTGTGCCCTCTGATCCA | −20_6-6_internal_loop- | −20 | 32 |
| | | 0.100.55 | AGCATCCCCATTCTACAGTA | symmetric_CAUCAU-CGCUAC, -7_1- | | |
| | | | GGACTGAGCACTGCCGAGC | 1_wobble_U-G, -6_1-1_mismatch_G-G, | | |
| | | | TGGGCAATCTTTGCACGCTA | -4_0-1_bulge-asymmetric_-C, -2_1- | | |
| | | | CGCAGCATTGGGATACAGT | 0_bulge-asymmetric_A-, 0_1- | | |
| | | | GT | 1_mismatch_A-C, 4_1-1_mismatch_U- | | |
| | | | | C, 13_1-1_mismatch_A-G, 16_1- | | |
| | | | | 1_wobble_G-U, 32_6-6_internal_loop- | | |
| | | | | symmetric_AAAAAC-CCAAGC | | |
| 2986 | 99A-99C | 871 (−18, +32) | CTGGTGTGCCCTCTGATCCA | -18_6-6_internal_loop- | −18 | 32 |
| | | 0.100.55 | AGCATCCCCATTCTACAGTA | symmetric_UCAUUG-GUCGCU, -7_1- | | |
| | | | GGACTGAGCACTGCCGAGC | 1_wobble_U-G, -6_1-1_mismatch_G-G, | | |
| | | | TGGGCAATCTTTGGTCGCTT | -4_0-1_bulge-asymmetric_-C, -2_1- | | |
| | | | GGCAGCATTGGGATACAGT | 0_bulge-asymmetric_A-, 0_1- | | |
| | | | GT | 1_mismatch_A-C, 4_1-1_mismatch_U- | | |
| | | | | C, 13_1-1_mismatch_A-G, 16_1- | | |
| | | | | 1_wobble_G-U, 32_6-6_internal_loop- | | |
| | | | | symmetric_AAAAAC-CCAAGC | | |
| 2987 | 99A-99C | 871 (−16, +32) | CTGGTGTGCCCTCTGATCCA | -16_6-6_internal_loop- | −16 | 32 |
| | | 0.100.55 | AGCATCCCCATTCTACAGTA | symmetric_AUUGCA-GAGUCG, -7_1- | | |
| | | | GGACTGAGCACTGCCGAGC | 1_wobble_U-G, -6_1-1_mismatch_G-G, | | |
| | | | TGGGCAATCTTGAGTCGGAT | -4_0-1_bulge-asymmetric_-C, -2_1- | | |
| | | | GGCAGCATTGGGATACAGT | 0_bulge-asymmetric_A-, 0_1- | | |
| | | | GT | 1_mismatch_A-C, 4_1-1_mismatch_U- | | |
| | | | | C, 13_1-1_mismatch_A-G, 16_1- | | |
| | | | | 1_wobble_G-U, 32_6-6_internal_loop- | | |
| | | | | symmetric_AAAAAC-CCAAGC | | |
| 2988 | 99A-99C | 871 (−13, +32) | CTGGTGTGCCCTCTGATCCA | -13_6-6_internal_loop- | −13 | 32 |
| | | 0.100.55 | AGCATCCCCATTCTACAGTA | symmetric_GCAAAG-GAAGAG, -7_1- | | |
| | | | GGACTGAGCACTGCCGAGC | 1_wobble_U-G, -6_1-1_mismatch_G-G, | | |
| | | | TGGGCAATGAAGAGAATGA | -4_0-1_bulge-asymmetric_-C, -2_1- | | |
| | | | TGGCAGCATTGGGATACAGT | 0_bulge-asymmetric_A-, 0_1- | | |
| | | | GT | 1_mismatch_A-C, 4_1-1_mismatch_U- | | |
| | | | | C, 13_1-1_mismatch_A-G, 16_1- | | |
| | | | | 1_wobble_G-U, 32_6-6_internal_loop- | | |
| | | | | symmetric_AAAAAC-CCAAGC | | |
| 2989 | 100A-100C | 871 (−16, +32) | CTGGTGTGCCCTCTGATCCA | -16_6-6_internal_loop- | −16 | 32 |
| | | 0.90.55L10 | AGCATCCCCATTCTACAGTA | symmetric_AUUGCA-GAGUCG, -7_1- | | |
| | | | GGACTGAGCACTGCCGAGC | 1_wobble_U-G, -6_1-1_mismatch_G-G, | | |
| | | | TGGGCAATCTTGAGTCGGAT | -4_0-1_bulge-asymmetric_-C, -2 1- | | |
| | | | GGCAGCATTGG | 0_bulge-asymmetric_A-, 0_1- | | |
| | | | | 1_mismatch_A-C, 4_1-1_mismatch_U- | | |
| | | | | C, 13_1-1_mismatch_A-G, 16_1- | | |
| | | | | 1_wobble_G-U, 32_6-6_internal_loop- | | |
| | | | | symmetric_AAAAAC-CCAAGC | | |
| 2990 | 100A-100C | 871 (−16, +32) | CTGGTGTGCCCTCTGATCCA | -16_6-6_internal_loop- | −16 | 32 |
| | | 0.92.55L8 | AGCATCCCCATTCTACAGTA | symmetric_AUUGCA-GAGUCG, -7_1- | | |
| | | | GGACTGAGCACTGCCGAGC | 1_wobble_U-G, -6_1-1_mismatch_G-G, | | |
| | | | TGGGCAATCTTGAGTCGGAT | -4_0-1_bulge-asymmetric_-C, -2_1- | | |
| | | | GGCAGCATTGGGA | 0_bulge-asymmetric_A-, 0_1- | | |
| | | | | 1_mismatch_A-C, 4_1-1_mismatch_U- | | |
| | | | | C, 13_1-1_mismatch_A-G, 16_1- | | |
| | | | | 1_wobble_G-U, 32_6-6_internal_loop- | | |
| | | | | symmetric_AAAAAC-CCAAGC | | |
| 2991 | 100A-100C | 871 (−16, +32) | CTGGTGTGCCCTCTGATCCA | -16_6-6_internal_loop- | −16 | 32 |
| | | 0.94.55L6 | AGCATCCCCATTCTACAGTA | symmetric_AUUGCA-GAGUCG, -7_1- | | |
| | | | GGACTGAGCACTGCCGAGC | 1_wobble_U-G, -6_1-1_mismatch_G-G, | | |
| | | | TGGGCAATCTTGAGTCGGAT | -4_0-1_bulge-asymmetric_-C, -2_1- | | |
| | | | GGCAGCATTGGGATA | 0_bulge-asymmetric_A-, 0_1- | | |
| | | | | 1_mismatch_A-C, 4_1-1_mismatch_U- | | |
| | | | | C, 13_1-1_mismatch_A-G, 16_1- | | |
| | | | | 1_wobble_G-U, 32_6-6_internal_loop- | | |
| | | | | symmetric_AAAAAC-CCAAGC | | |
| 2992 | 100A-100C | 871 (−16, +32) | CTGGTGTGCCCTCTGATCCA | -16_6-6_internal_loop- | −16 | 32 |
| | | 0.96.55L4 | AGCATCCCCATTCTACAGTA | symmetric_AUUGCA-GAGUCG, -7_1- | | |
| | | | GGACTGAGCACTGCCGAGC | 1_wobble_U-G, -6_1-1_mismatch_G-G, | | |
| | | | TGGGCAATCTTGAGTCGGAT | -4_0-1_bulge-asymmetric_-C, -2_1- | | |
| | | | GGCAGCATTGGGATACA | 0_bulge-asymmetric_A-, 0_1- | | |
| | | | | 1_mismatch_A-C, 4_1-1_mismatch_U- | | |
| | | | | C, 13_1-1_mismatch_A-G, 16_1- | | |
| | | | | 1_wobble_G-U, 32_6-6_internal_loop- | | |
| | | | | symmetric_AAAAAC-CCAAGC | | |
| 2993 | 100A-100C | 871 (−16, +32) | CTGGTGTGCCCTCTGATCCA | -16_6-6_internal_loop- | −16 | 32 |
| | | 0.98.55L2 | AGCATCCCCATTCTACAGTA | symmetric_AUUGCA-GAGUCG, -7_1- | | |
| | | | GGACTGAGCACTGCCGAGC | 1_wobble_U-G, -6_1-1_mismatch_G-G, | | |
| | | | TGGGCAATCTTGAGTCGGAT | -4_0-1_bulge-asymmetric_-C, -2_1- | | |
| | | | GGCAGCATTGGGATACAGT | 0_bulge-asymmetric_A-, 0_1- | | |
| | | | | 1_mismatch_A-C, 4_1-1_mismatch_U- | | |
| | | | | C, 13_1-1_mismatch_A-G, 16_1- | | |
| | | | | 1_wobble_G-U, 32_6-6_internal_loop- | | |
| | | | | symmetric_AAAAAC-CCAAGC | | |
| 2994 | 100A-100C | 871 (−16, +32) | CTCTGATCCAAGCATCCCCA | -16_6-6_internal_loop- | −16 | 32 |
| | | 0.90.45R10 | TTCTACAGTAGGACTGAGCA | symmetric_AUUGCA-GAGUCG, -7_1- | | |
| | | | CTGCCGAGCTGGGCAATCTT | 1_wobble_U-G, -6_1-1_mismatch_G-G, | | |
| | | | GAGTCGGATGGCAGCATTG | -4_0-1_bulge-asymmetric_-C, -2_1- | | |
| | | | GGATACAGTGT | 0_bulge-asymmetric_A-, 0_1- | | |
| | | | | 1_mismatch_A-C, 4_1-1_mismatch_U- | | |
| | | | | C, 13_1-1_mismatch_A-G, 16_1- | | |
| | | | | 1_wobble_G-U, 32_6-6_internal_loop- | | |
| | | | | symmetric_AAAAAC-CCAAGC | | |
| 2995 | 100A-100C | 871 (−16, +32) | CCCTCTGATCCAAGCATCCC | -16_6-6_internal_loop- | −16 | 32 |
| | | 0.92.47R8 | CATTCTACAGTAGGACTGAG | symmetric_AUUGCA-GAGUCG, -7_1- | | |
| | | | CACTGCCGAGCTGGGCAATC | 1_wobble_U-G, -6_1-1_mismatch_G-G, | | |
| | | | TTGAGTCGGATGGCAGCATT | -4_0-1_bulge-asymmetric_-C, -2_1- | | |
| | | | GGGATACAGTGT | 0_bulge-asymmetric_A-, 0_1- | | |
| | | | | 1_mismatch_A-C, 4_1-1_mismatch_U- | | |
| | | | | C, 13_1-1_mismatch_A-G, 16_1- | | |
| | | | | 1_wobble_G-U, 32_6-6_internal_loop- | | |
| | | | | symmetric_AAAAAC-CCAAGC | | |
| 2996 | 100A-100C | 871 (−16, +32) | TGCCCTCTGATCCAAGCATC | -16_6-6_internal_loop- | −16 | 32 |
| | | 0.94.49R6 | CCCATTCTACAGTAGGACTG | symmetric_AUUGCA-GAGUCG, -7_1- | | |
| | | | AGCACTGCCGAGCTGGGCA | 1_wobble_U-G, -6_1-1_mismatch_G-G, | | |
| | | | ATCTTGAGTCGGATGGCAGC | -4_0-1_bulge-asymmetric_-C, -2_1- | | |
| | | | ATTGGGATACAGTGT | 0_bulge-asymmetric_A-, 0_1- | | |
| | | | | 1_mismatch_A-C, 4_1-1_mismatch_U- | | |
| | | | | C, 13_1-1_mismatch_A-G, 16_1- | | |
| | | | | 1_wobble_G-U, 32_6-6_internal_loop- | | |
| | | | | symmetric_AAAAAC-CCAAGC | | |
| 2997 | 100A-100C | 871 (−16, +32) | TGTGCCCTCTGATCCAAGCA | -16_6-6_internal_loop- | −16 | 32 |
| | | 0.96.51R4 | TCCCCATTCTACAGTAGGAC | symmetric_AUUGCA-GAGUCG, -7_1- | | |
| | | | TGAGCACTGCCGAGCTGGG | 1_wobble_U-G, -6_1-1_mismatch_G-G, | | |
| | | | CAATCTTGAGTCGGATGGCA | -4_0-1_bulge-asymmetri_-C, -2_1- | | |
| | | | GCATTGGGATACAGTGT | 0_bulge-asymmetric_A-, 0_1- | | |
| | | | | 1_mismatch_A-C, 4_ 1-1_mismatch_U- | | |
| | | | | C, 13_1-1_mismatch_A-G, 16_1- | | |
| | | | | 1_wobble_G-U, 32_6-6_internal_loop- | | |
| | | | | symmetric_AAAAAC-CCAAGC | | |
| 2998 | 100A-100C | 871 (−16, +32) | GGTGTGCCCTCTGATCCAAG | -16_6-6_internal_loop- | −16 | 32 |
| | | 0.98.53R2 | CATCCCCATTCTACAGTAGG | symmetric_AUUGCA-GAGUCG, -7_1- | | |
| | | | ACTGAGCACTGCCGAGCTG | 1_wobble_U-G, -6_1-1_mismatch_G-G, | | |
| | | | GGCAATCTTGAGTCGGATGG | -4_0-1_bulge-asymmetric_-C, -2_1- | | |
| | | | CAGCATTGGGATACAGTGT | 0_bulge-asymmetric_A-, 0_1- | | |
| | | | | 1_mismatch_A-C, 4_1-1_mismatch_U- | | |
| | | | | C, 13_1-1_mismatch_A-G, 16_1- | | |
| | | | | 1_wobble_G-U, 32_6-6_internal_loop- | | |
| | | | | symmetric_AAAAAC-CCAAGC | | |
| 2999 | 100A-100C | 871 (−16, +32) | CTGGTGTGCCCTCTGATCCA | -16_6-6_internal_loop- | −16 | 32 |
| | | 0.100.55 | AGCATCCCCATTCTACAGTA | symmetric_AUUGCA-GAGUCG, -7_1- | | |
| | | | GGACTGAGCACTGCCGAGC | 1_wobble_U-G, -6_1-1_mismatch_G-G, | | |
| | | | TGGGCAATCTTGAGTCGGAT | -4_0-1_bulge-asymmetric_-C, -2_1- | | |
| | | | GGCAGCATTGGGATACAGT | 0_bulge-asymmetric_A-, 0_1- | | |
| | | | GT | 1_mismatch_A-C, 4_1-1_mismatch_U- | | |
| | | | | C, 13_1-1_mismatch_A-G, 16_1- | | |
| | | | | 1_wobble_G-U, 32_6-6_internal_loop- | | |
| | | | | symmetric_AAAAAC-CCAAGC | | |
| 3000 | 101A, | 919 0.113.57 | CCCTGGTGTGCCCTCTGATG | −49_1-1_wobble_U-G, -22_6- | −22 | 25 |
| | 101P, | (−22, +26) | TTTTTCAGTAGCTTCTACAG | 6_internal_loop-symmetric_GCCAUC- | | |
| | 101Q, | | CAGTTCGGAGGAATCCCGA | AAGAGA, -3_1-1 wobble_U-G, -2_1- | | |
| | 101R | | GGTCAGCAATCTTTGCAATA | 1_mismatch_A-A, 0_1-1_mismatch_A- | | |
| | | | AGAGAAGCATTGGGATACA | C, 2_1-1_mismatch_C-C, 6_1- | | |
| | | | GTGTGAAGAGCAGCA | 1_mismatch_G-G, 10_3-3_bulge- | | |
| | | | | symmetric_AGU-UCG, 25_7- | | |
| | | | | 7_internal_loop- | | |
| | | | | symmetric_UGGGGAU-CAGUAGC | | |
| 3001 | 101A, | 919 0.113.57 | CCCTGGTGTGCCCTCTGATG | −49_1-1_wobble_U-G, −20_6- | −20 | 25 |
| | 101L, | (−20, +26) | TTTTTTAGGGGCTTCTACAG | 6_internal_loop-symmetric_CAUCAU- | | |
| | 101M | | CAGTTCGGAGGAATCCCGA | UACUAC, -3_1-1_wobble_U-G, -2_1- | | |
| | | | GGTCAGCAATCTTTGCATAC | 1_mismatch_A-A, 0_1-1_mismatch_A- | | |
| | | | TACGCAGCATTGGGATACA | C, 2_1-1_mismatch_C-C, 6_1- | | |
| | | | GTGTGAAGAGCAGCA | 1_mismatch_G-G, 10_3-3_bulge- | | |
| | | | | symmetric_AGU-UCG, 25_7- | | |
| | | | | 7_internal_loop- | | |
| | | | | symmetric_UGGGGAU-UAGGGGC | | |
| 3002 | 101A, | 919 0.113.57 | CCCTGGTGTGCCCTCTGATG | −49_1-1_wobble_U-G, -18_6- | −18 | 24 |
| | 101S, | (−18, +24) | TTTTTATGGAACGTCTACAG | 6_internal_loop-symmetric_UCAUUG- | | |
| | 101T | | CAGTTCGGAGGAATCCCGA | GUAGCU, -3_1-1_wobble_U-G, -2_1- | | |
| | | | GGTCAGCAATCTTTGGTAGC | 1_mismatch_A-A, 0_1-1_mismatch_A- | | |
| | | | TTGGCAGCATTGGGATACAG | C, 2_1-1_mismatch_C-C, 6_1- | | |
| | | | TGTGAAGAGCAGCA | 1_mismatch_G-G, 10_3-3_bulge- | | |
| | | | | symmetric_AGU-UCG, 24_6- | | |
| | | | | 6_internal_loop-symmetric_AUGGGG- | | |
| | | | | GGAACG | | |
| 3003 | 101A, | 919 0.113.57 | CCCTGGTGTGCCCTCTGATG | −49_1-1_wobble_U-G, -18_6- | −18 | 22 |
| | 101H, | (−18, +22) | TTTTTATCCAGCGGGTACAG | 6_internal_loop-symmetric_UCAUUG- | | |
| | 101I | | CAGTTCGGAGGAATCCCGA | GUCUUC, -3_1-1_wobble_U-G, -2_1- | | |
| | | | GGTCAGCAATCTTTGGTCTT | 1_mismatch_A-A, 0_1-1_mismatch_A- | | |
| | | | CTGGCAGCATTGGGATACA | C, 2_1-1_mismatch_C-C, 6_1- | | |
| | | | GTGTGAAGAGCAGCA | 1_mismatch_G-G, 10_3-3_bulge- | | |
| | | | | symmetric_AGU-UCG, 22_6- | | |
| | | | | 6_internal_loop-symmetric_GAAUGG- | | |
| | | | | AGCGGG | | |
| 3004 | 101A, | 919 0.113.57 | CCCTGGTGTGCCCTCTGATG | −49_1-1_wobble_U-G, -16_6- | −16 | N/A |
| | 101N, | (−16, +28) | TTTCAACGGCCCTTCTACAG | 6_internal_loop-symmetric_AUUGCA- | | |
| | 101O | | CAGTTCGGAGGAATCCCGA | ACCCUG, -3_1-1_wobble_U-G, -2_1- | | |
| | | | GGTCAGCAATCTTACCCTGG | 1_mismatch_A-A, 0_1-1_mismatch_A- | | |
| | | | ATGGCAGCATTGGGATACA | C, 2_1-1_mismatch_C-C, 6_1- | | |
| | | | GTGTGAAGAGCAGCA | 1_mismatch_G-G, 10_3-3_bulge- | | |
| | | | | symmetric_AGU-UCG, 25_1-0_bulge- | | |
| | | | | asymmetric_U-, 29_5-6_internal_loop- | | |
| | | | | asymmetric_GAUAA-CAACGG | | |
| 3005 | 101A, | 919 0.113.57 | CCCTGGTGTGCCCTCTGATG | −49_1-1_wobble_U-G, -16_6- | −16 | 24 |
| | 101J, | (−16, +24) | TTTTTATTGAGCCTCTACAG | 6_internal_loop-symmetric_AUUGCA- | | |
| | 101K | | CAGTTCGGAGGAATCCCGA | AAAUUA, -3_1-1_wobble_U-G, -2_1- | | |
| | | | GGTCAGCAATCTTAAATTAG | 1_mismatch_A-A, 0_1-1_mismatch_A- | | |
| | | | ATGGCAGCATTGGGATACA | C, 2_1-1_mismatch_C-C, 6_1- | | |
| | | | GTGTGAAGAGCAGCA | 1_mismatch_G-G, 10_3-3_bulge- | | |
| | | | | symmetric_AGU-UCG, 24_5- | | |
| | | | | 5_internal_loop-symmetric_AUGGG- | | |
| | | | | GAGCC, 29_1-1_wobble G-U | | |
| 3006 | 101A, | 919 0.113.57 | CCCTGGTGTGCCCTCTGATG | −49_1-1_wobble_U-G, -14_6- | −14 | 25 |
| | 101F, | (−14, +26) | TTTTTTAGGGGCTTCTACAG | 6_internal_loop-symmetric_UGCAAA- | | |
| | 101G | | CAGTTCGGAGGAATCCCGA | AAACGU, -3_1-1_wobble_U-G, -2_1- | | |
| | | | GGTCAGCAATCAAACGTAT | 1_mismatch_A-A, 0_1-1_mismatch_A- | | |
| | | | GATGGCAGCATTGGGATAC | C, 2_1-1_mismatch_C-C, 6_1- | | |
| | | | AGTGTGAAGAGCAGCA | 1_mismatch_G-G, 10_3-3_bulge- | | |
| | | | | symmetric_AGU-UCG, 25_7- | | |
| | | | | 7_internal_loop- | | |
| | | | | symmetric_UGGGGAU-UAGGGGC | | |
| 166 | 101A-101C | 919 0.113.57 | CCCTGGTGTGCCCTCTGATG | −49_1-1_wobble_U-G, -12_6- | −12 | 24 |
| | | (−12, +24) | TTTTTATGAGGCGTCTACAG | 6_internal_loop-symmetric_CAAAGA- | | |
| | | | CAGTTCGGAGGAATCCCGA | GACUAA, -3_1-1_wobble_U-G, -2_1- | | |
| | | | GGTCAGCAAGACTAACAAT | 1_mismatch_A-A, 0_1-1_mismatch_A- | | |
| | | | GATGGCAGCATTGGGATAC | C, 2_1-1_mismatch_C-C, 6 1- | | |
| | | | AGTGTGAAGAGCAGCA | 1_mismatch_G-G, 10_3-3_bulge- | | |
| | | | | symmetric_AGU-UCG, 24_6- | | |
| | | | | 6_internal_loop-symmetric_AUGGGG- | | |
| | | | | GAGGCG | | |
| 3008 | 101A, | 919 0.113.57 | CCCTGGTGTGCCCTCTGATG | −49_1-1_wobble_U-G, -10_6- | −10 | 24 |
| | 101D, | (−10, +24) | TTTTTATTGAGCCTCTACAG | 6_internal_loop-symmetric_AAGAUU- | | |
| | 101E | | CAGTTCGGAGGAATCCCGA | UUAGCC, -3_1-1_wobble_U-G, -2_1- | | |
| | | | GGTCAGCTTAGCCTGCAATG | 1_mismatch_A-A, 0_1-1_mismatch_A- | | |
| | | | ATGGCAGCATTGGGATACA | C, 2_1-1_mismatch_C-C, 6_1- | | |
| | | | GTGTGAAGAGCAGCA | 1_mismatch_G-G, 10_3-3_bulge- | | |
| | | | | symmetric_AGU-UCG, 24_5- | | |
| | | | | 5_internal_loop-symmetric_AUGGG- | | |
| | | | | GAGCC, 29_1-1_wobble_G-U | | |
| 3009 | 102A-102C | 919 (−12, +24) | AACTTCAGGTGCACGAAAC | -12_6-6_internal_loop- | −12 | 24 |
| | | 0.100.75 | CCTGGTGTGCCCTCTGATGT | symmetric_CAAAGA-GACUAA, -3_1- | | |
| | | | TTTTATGAGGCGTCTACAGC | 1_wobble_U-G, -2_1-1_mismatch_A-A, | | |
| | | | AGTTCGGAGGAATCCCGAG | 0_1-1_mismatch_A-C, 2_1- | | |
| | | | GTCAGCAAGACTAACAATG | 1_mismatch_C-C, 6_1-1_mismatch_G- | | |
| | | | ATG | G, 10_3-3_bulge-symmetric_AGU- | | |
| | | | | UCG, 24_6-6_internal_loop- | | |
| | | | | symmetric_AUGGGG-GAGGCG | | |
| 3010 | 102A-102C | 919 (−12, +24) | CAGGTGCACGAAACCCTGG | -12_6-6_internal_loop- | −12 | 24 |
| | | 0.100.70 | TGTGCCCTCTGATGTTTTTAT | symmetric_CAAAGA-GACUAA, -3_1- | | |
| | | | GAGGCGTCTACAGCAGTTCG | 1_wobble_U-G, -2_1-1_mismatch_A-A, | | |
| | | | GAGGAATCCCGAGGTCAGC | 0_1-1_mismatch_A-C, 2_1- | | |
| | | | AAGACTAACAATGATGGCA | 1_mismatch_C-C, 6_1-1_mismatch_G- | | |
| | | | GC | G, 10_3-3_bulge-symmetric_AGU- | | |
| | | | | UCG, 24_6-6_internal_loop- | | |
| | | | | symmetric_AUGGGG-GAGGCG | | |
| 3011 | 102A-102C | 919 (−12, +24) | GCACGAAACCCTGGTGTGCC | -12_6-6_internal_loop- | −12 | 24 |
| | | 0.100.65 | CTCTGATGTTTTTATGAGGC | symmetric_CAAAGA-GACUAA, -3_1- | | |
| | | | GTCTACAGCAGTTCGGAGG | 1_wobble_U-G, -2_1-1_mismatch_A-A, | | |
| | | | AATCCCGAGGTCAGCAAGA | 0_1-1_mismatch_A-C, 2_1- | | |
| | | | CTAACAATGATGGCAGCATT | 1_mismatch_C-C, 6_1-1_mismatch_G- | | |
| | | | GG | G, 10_3-3_bulge-symmetric_AGU- | | |
| | | | | UCG, 24_6-6_internal_loop- | | |
| | | | | symmetric_AUGGGG-GAGGCG | | |
| 3012 | 102A-102C | 919 (−12, +24) | AAACCCTGGTGTGCCCTCTG | -12_6-6_internal_loop- | −12 | 24 |
| | | 0.100.60 | ATGTTTTTATGAGGCGTCTA | symmetric_CAAAGA-GACUAA, -3_1- | | |
| | | | CAGCAGTTCGGAGGAATCC | 1_wobble_U-G, -2_1-1_mismatch_A-A, | | |
| | | | CGAGGTCAGCAAGACTAAC | 0_1-1_mismatch_A-C, 2_1- | | |
| | | | AATGATGGCAGCATTGGGA | 1_mismatch_C-C, 6_1-1_mismatch_G- | | |
| | | | TAC | G, 10_3-3_bulge-symmetric_AGU- | | |
| | | | | UCG, 24_6-6_internal_loop- | | |
| | | | | symmetric_AUGGGG-GAGGCG | | |
| 3013 | 102A-102C | 919 (−12, +24) | CTGGTGTGCCCTCTGATGTT | -12_6-6_internal_loop- | −12 | 24 |
| | | 0.100.55 | TTTATGAGGCGTCTACAGCA | symmetric_CAAAGA-GACUAA, -3_1- | | |
| | | | GTTCGGAGGAATCCCGAGG | 1_wobble_U-G, -2_1-1_mismatch_A-A, | | |
| | | | TCAGCAAGACTAACAATGA | 0_1-1_mismatch_A-C, 2_1- | | |
| | | | TGGCAGCATTGGGATACAGT | 1_mismatch_C-C, 6_1-1_mismatch_G- | | |
| | | | GT | G, 10_3-3_bulge-symmetric_AGU- | | |
| | | | | UCG, 24_6-6_internal_loop- | | |
| | | | | symmetric_AUGGGG-GAGGCG | | |
| 3014 | 102A-102C | 919 (−12, +24) | GTGCCCTCTGATGTTTTTAT | -12_6-6_internal_loop- | −12 | 24 |
| | | 0.100.50 | GAGGCGTCTACAGCAGTTCG | symmetric_CAAAGA-GACUAA, -3_1- | | |
| | | | GAGGAATCCCGAGGTCAGC | 1_wobble_U-G, -2_1-1_mismatch_A-A, | | |
| | | | AAGACTAACAATGATGGCA | 0_1-1_mismatch_A-C, 2_1- | | |
| | | | GCATTGGGATACAGTGTGA | 1_mismatch_C-C, 6_1-1_mismatch_G- | | |
| | | | AAA | G, 10_3-3_bulge-symmetric_AGU- | | |
| | | | | UCG, 24_6-6_internal_loop- | | |
| | | | | symmetric_AUGGGG-GAGGCG | | |
| 166 | 102A-102C | 919 (−12, +24) | CCCTGGTGTGCCCTCTGATG | −49_1-1_wobble_U-G, -12_6- | −12 | 24 |
| | | 0.113.57 | TTTTTATGAGGCGTCTACAG | 6_internal_loop-symmetric_CAAAGA- | | |
| | | | CAGTTCGGAGGAATCCCGA | GACUAA, -3_1-1_wobble_U-G, -2_1- | | |
| | | | GGTCAGCAAGACTAACAAT | 1_mismatch_A-A, 0_1-1_mismatch_A- | | |
| | | | GATGGCAGCATTGGGATAC | C, 2_1-1_mismatch_C-C, 6_1- | | |
| | | | AGTGTGAAGAGCAGCA | 1_mismatch_G-G, 10_3-3_bulge- | | |
| | | | | symmetric_AGU-UCG, 24_6- | | |
| | | | | 6_internal_loop-symmetric_AUGGGG- | | |
| | | | | GAGGCG | | |
| 3016 | 103A | 919 (−12, +34) | GTGCCCTCTGTACAAATTAT | -12_6-6_internal_loop- | −12 | 34 |
| | | 0.100.50 | CCCCATTCTACAGCAGTTCG | symmetric_CAAAGA-GACUAA, -3_1- | | |
| | | | GAGGAATCCCGAGGTCAGC | 1_wobble_U-G, -2_1-1_mismatch_A-A, | | |
| | | | AAGACTAACAATGATGGCA | 0_1-1_mismatch_A-C, 2_1- | | |
| | | | GCATTGGGATACAGTGTGA | 1_mismatch_C-C, 6_1-1_mismatch_G- | | |
| | | | AAA | G, 10_3-3_bulge-symmetric_AGU- | | |
| | | | | UCG, 34_6-6_internal_loop- | | |
| | | | | symmetric_AAACAU-UACAAA | | |
| 3017 | 103A | 919 (−12, +32) | GTGCCCTCTGATCAAAGCAT | -12_6-6_internal_loop- | −12 | 32 |
| | | 0.100.50 | CCCCATTCTACAGCAGTTCG | symmetric_CAAAGA-GACUAA, -3_1- | | |
| | | | GAGGAATCCCGAGGTCAGC | 1_wobble_U-G, -2_1-1_mismatch_A-A, | | |
| | | | AAGACTAACAATGATGGCA | 0_1-1_mismatch_A-C, 2_1- | | |
| | | | GCATTGGGATACAGTGTGA | 1_mismatch_C-C, 6_1-1_mismatch_G- | | |
| | | | AAA | G, 10_3-3_bulge-symmetric_AGU- | | |
| | | | | UCG, 32_6-6_internal_loop- | | |
| | | | | symmetric_AAAAAC-CAAAGC | | |
| 3018 | 103A | 919 (−12, +30) | GTGCCCTCTGATGTAAGCTA | -12_6-6_internal_loop- | −12 | 30 |
| | | 0.100.50 | CCCCATTCTACAGCAGTTCG | symmetric_CAAAGA-GACUAA, -3_1- | | |
| | | | GAGGAATCCCGAGGTCAGC | 1_wobble_U-G, -2_1-1_mismatch_A-A, | | |
| | | | AAGACTAACAATGATGGCA | 0_1-1_mismatch_A-C, 2_1- | | |
| | | | GCATTGGGATACAGTGTGA | 1_mismatch_C-C, 6_1-1_mismatch_G- | | |
| | | | AAA | G, 10_3-3_bulge-symmetric_AGU- | | |
| | | | | UCG, 30_6-6_internal_loop- | | |
| | | | | symmetric_AUAAAA-AAGCUA | | |
| 3019 | 103A | 919 (−12, +28) | GTGCCCTCTGATGTTTGCTA | -12_6-6_internal_loop- | −12 | 28 |
| | | 0.100.50 | GACCATTCTACAGCAGTTCG | symmetric_CAAAGA-GACUAA, -3_1- | | |
| | | | GAGGAATCCCGAGGTCAGC | 1_wobble_U-G, -2_1-1_mismatch_A-A, | | |
| | | | AAGACTAACAATGATGGCA | 0_1-1_mismatch_A-C, 2_1- | | |
| | | | GCATTGGGATACAGTGTGA | 1_mismatch_C-C, 6_1-1_mismatch_G- | | |
| | | | AAA | G, 10_3-3_bulge-symmetric_AGU- | | |
| | | | | UCG, 28_6-6_internal_loop- | | |
| | | | | symmetric_GGAUAA-GCUAGA | | |
| 3020 | 103A | 919 (−12, +26) | GTGCCCTCTGATGTTTTTTA | -12 6-6_internal_loop- | −12 | 26 |
| | | 0.100.50 | GAGGATTCTACAGCAGTTCG | symmetric_CAAAGA-GACUAA, -3_1- | | |
| | | | GAGGAATCCCGAGGTCAGC | 1_wobble_U-G, -2_1-1_mismatch_A-A, | | |
| | | | AAGACTAACAATGATGGCA | 0_1-1_mismatch_A-C, 2_1- | | |
| | | | GCATTGGGATACAGTGTGA | 1_mismatch_C-C, 6_1-1_mismatch_G- | | |
| | | | AAA | G, 10_3-3_bulge-symmetric_AGU- | | |
| | | | | UCG, 26_6-6_internal_loop- | | |
| | | | | symmetric_GGGGAU-UAGAGG | | |
| 3021 | 103A-103C | 919 (−12, +24) | GTGCCCTCTGATGTTTTTAT | -12_6-6_internal_loop- | −12 | 24 |
| | | 0.100.50 | GAGGCGTCTACAGCAGTTCG | symmetric_CAAAGA-GACUAA, -3_1- | | |
| | | | GAGGAATCCCGAGGTCAGC | 1_wobble_U-G, -2_1-1_mismatch_A-A, | | |
| | | | AAGACTAACAATGATGGCA | 0_1-1_mismatch_A-C, 2_1- | | |
| | | | GCATTGGGATACAGTGTGA | 1_mismatch_C-C, 6_1-1_mismatch_G- | | |
| | | | AAA | G, 10_3-3_bulge-symmetric_AGU- | | |
| | | | | UCG, 24_6-6_internal_loop- | | |
| | | | | symmetric_AUGGGG-GAGGCG | | |
| 3022 | 103A-103C | 919 (−12, +22) | GTGCCCTCTGATGTTTTTAT | -12_6-6_internal_loop- | −12 | 22 |
| | | 0.100.50 | CCGGCGAGTACAGCAGTTC | symmetric_CAAAGA-GACUAA, -3_1- | | |
| | | | GGAGGAATCCCGAGGTCAG | 1_wobble_U-G, -2_1-1_mismatch_A-A, | | |
| | | | CAAGACTAACAATGATGGC | 0_1-1_mismatch_A-C, 2_1- | | |
| | | | AGCATTGGGATACAGTGTG | 1_mismatch_C-C, 6_1-1_mismatch_G- | | |
| | | | AAAA | G, 10_3-3_bulge-symmetric_AGU- | | |
| | | | | UCG, 22_6-6_internal_loop- | | |
| | | | | symmetric_GAAUGG-GGCGAG | | |
| 3023 | 103A | 919 (−12, +20) | GTGCCCTCTGATGTTTTTAT | -12_6-6_internal_loop- | −12 | 20 |
| | | 0.100.50 | CCCCCGAGATCAGCAGTTCG | symmetric_CAAAGA-GACUAA, -3_1- | | |
| | | | GAGGAATCCCGAGGTCAGC | 1_wobble_U-G, -2_1-1_mismatch_A-A, | | |
| | | | AAGACTAACAATGATGGCA | 0_1-1_mismatch_A-C, 2_1- | | |
| | | | GCATTGGGATACAGTGTGA | 1_mismatch_C-C, 6_1-1_mismatch_G- | | |
| | | | AAA | G, 10_3-3_bulge-symmetric_AGU- | | |
| | | | | UCG, 20_6-6_internal_loop- | | |
| | | | | symmetric_UAGAAU-CGAGAU | | |
| 3024 | 103A | 919 (−12, +18) | GTGCCCTCTGATGTTTTTAT | -12_6-6_internal_loop- | −12 | 18 |
| | | 0.100.50 | CCCCATAGATGTGCAGTTCG | symmetric_CAAAGA-GACUAA, -3_1- | | |
| | | | GAGGAATCCCGAGGTCAGC | 1_wobble_U-G, -2_1-1_mismatch_A-A, | | |
| | | | AAGACTAACAATGATGGCA | 0_1-1_mismatch_A-C, 2_1- | | |
| | | | GCATTGGGATACAGTGTGA | 1_mismatch_C-C, 6_1-1_mismatch_G- | | |
| | | | AAA | G, 10_3-3_bulge-symmetric_AGU- | | |
| | | | | UCG, 18_6-6_internal_loop- | | |
| | | | | symmetric_UGUAGA-AGAUGU | | |
| 3025 | 104A-104C | 919 (−24, +22) | GTGCCCTCTGATGTTTTTAT | -24_6-6_internal_loop- | −24 | 22 |
| | | 0.100.50 | CCGGCGAGTACAGCAGTTC | symmetric_CUGCCA-ACCGUC, -3_1- | | |
| | | | GGAGGAATCCCGAGGTCAG | 1_wobble_U-G, -2_1-1_mismatch_A-A, | | |
| | | | CAATCTTTGCAATGAACCGT | 0_1-1_mismatch_A-C, 2_1- | | |
| | | | CCATTGGGATACAGTGTGAA | 1_mismatch_C-C, 6_1-1_mismatch_G- | | |
| | | | AA | G, 10_3-3_bulge-symmetric_AGU- | | |
| | | | | UCG, 22_6-6_internal_loop- | | |
| | | | | symmetric_GAAUGG-GGCGAG | | |
| 3026 | 104A-104C | 919 (−22, +22) | GTGCCCTCTGATGTTTTTAT | -22_6-6_internal_loop- | −22 | 22 |
| | | 0.100.50 | CCGGCGAGTACAGCAGTTC | symmetric_GCCAUC-CUACCG, -3_1- | | |
| | | | GGAGGAATCCCGAGGTCAG | 1_wobble_U-G, -2_1-1_mismatch_A-A, | | |
| | | | CAATCTTTGCAATCTACCGA | 0_1-1_mismatch_A-C, 2_1- | | |
| | | | GCATTGGGATACAGTGTGA | 1_mismatch_C-C, 6_1-1_mismatch_G- | | |
| | | | AAA | G, 10_3-3_bulge-symmetric_AGU- | | |
| | | | | UCG, 22_6-6_internal_loop- | | |
| | | | | symmetric_GAAUGG-GGCGAG | | |
| 3027 | 104A-104C | 919 (−20, +22) | GTGCCCTCTGATGTTTTTAT | −20_6-6_internal_loop- | −20 | 22 |
| | | 0.100.50 | CCGGCGAGTACAGCAGTTC | symmetric_CAUCAU-UACUAC, -3_1- | | |
| | | | GGAGGAATCCCGAGGTCAG | 1_wobble_U-G, -2_1-1_mismatch_A-A, | | |
| | | | CAATCTTTGCATACTACGCA | 0_1-1_mismatch_A-C, 2_1- | | |
| | | | GCATTGGGATACAGTGTGA | 1_mismatch_C-C, 6_1-1_mismatch_G- | | |
| | | | AAA | G, 10_3-3_bulge-symmetric_AGU- | | |
| | | | | UCG, 22_6-6_internal_loop- | | |
| | | | | symmetric_GAAUGG-GGCGAG | | |
| 3028 | 104A-104C | 919 (−18, +22) | GTGCCCTCTGATGTTTTTAT | -18_6-6_internal_loop- | −18 | 22 |
| | | 0.100.50 | CCGGCGAGTACAGCAGTTC | symmetric_UCAUUG-GUUACU, -3_1- | | |
| | | | GGAGGAATCCCGAGGTCAG | 1_wobble_U-G, -2_1-1_mismatch_A-A, | | |
| | | | CAATCTTTGGTTACTTGGCA | 0_1-1_mismatch_A-C, 2_1- | | |
| | | | GCATTGGGATACAGTGTGA | 1_mismatch_C-C, 6_1-1_mismatch_G- | | |
| | | | AAA | G, 10_3-3_bulge-symmetric_AGU- | | |
| | | | | UCG, 22_6-6_internal_loop- | | |
| | | | | symmetric_GAAUGG-GGCGAG | | |
| 3029 | 104A-104C | 919 (−16, +22) | GTGCCCTCTGATGTTTTTAT | -16_6-6_internal_loop- | −16 | 22 |
| | | 0.100.50 | CCGGCGAGTACAGCAGTTC | symmetric_AUUGCA-AAGUUA, -3 1- | | |
| | | | GGAGGAATCCCGAGGTCAG | 1_wobble_U-G, -2_1-1_mismatch_A-A, | | |
| | | | CAATCTTAAGTTAGATGGCA | 0_1-1_mismatch_A-C, 2_1- | | |
| | | | GCATTGGGATACAGTGTGA | 1_mismatch_C-C, 6_1-1_mismatch_G- | | |
| | | | AAA | G, 10_3-3_bulge-symmetric_AGU- | | |
| | | | | UCG, 22_6-6_internal_loop- | | |
| | | | | symmetric_GAAUGG-GGCGAG | | |
| 3030 | 104A-104C | 919 (−14, +22) | GTGCCCTCTGATGTTTTTAT | -14_6-6_internal_loop- | −14 | 22 |
| | | 0.100.50 | CCGGCGAGTACAGCAGTTC | symmetric_UGCAAA-CUAAGU, -3_1- | | |
| | | | GGAGGAATCCCGAGGTCAG | 1_wobble_U-G, -2_1-1_mismatch_A-A, | | |
| | | | CAATCCTAAGTATGATGGCA | 0_1-1_mismatch_A-C, 2_1- | | |
| | | | GCATTGGGATACAGTGTGA | 1_mismatch_C-C, 6_1-1_mismatch_G- | | |
| | | | AAA | G, 10_3-3_bulge-symmetric_AGU- | | |
| | | | | UCG, 22_6-6_internal_loop- | | |
| | | | | symmetric_GAAUGG-GGCGAG | | |
| 3031 | 104A-104C | 919 (−12, +22) | GTGCCCTCTGATGTTTTTAT | -12_6-6_internal_loop- | −12 | 22 |
| | | 0.100.50 | CCGGCGAGTACAGCAGTTC | symmetric_CAAAGA-GACUAA, -3_1- | | |
| | | | GGAGGAATCCCGAGGTCAG | 1_wobble_U-G, -2_1-1_mismatch_A-A, | | |
| | | | CAAGACTAACAATGATGGC | 0_1-1_mismatch_A-C, 2_1- | | |
| | | | AGCATTGGGATACAGTGTG | 1_mismatch_C-C, 6_1-1_mismatch_G- | | |
| | | | AAAA | G, 10_3-3_bulge-symmetric_AGU- | | |
| | | | | UCG, 22_6-6_internal_loop- | | |
| | | | | symmetric_GAAUGG-GGCGAG | | |
| 3032 | 104A-104C | 919 (−9, +22) | GTGCCCTCTGATGTTTTTAT | -9_6-6_internal_loop- | −9 | 22 |
| | | 0.100.50 | CCGGCGAGTACAGCAGTTC | symmetric_AGAUUG-GUUGAC, -3_1- | | |
| | | | GGAGGAATCCCGAGGTCAG | 1_wobble_U-G, -2_1-1_mismatch_A-A, | | |
| | | | GTTGACTTGCAATGATGGCA | 0_1-1_mismatch_A-C, 2_1- | | |
| | | | GCATTGGGATACAGTGTGA | 1_mismatch_C-C, 6_1-1_mismatch_G- | | |
| | | | AAA | G, 10_3-3_bulge-symmetric_AGU- | | |
| | | | | UCG, 22_6-6_internal_loop- | | |
| | | | | symmetric_GAAUGG-GGCGAG | | |
| 3033 | 104A-104C | 919 (−7, +22) | GTGCCCTCTGATGTTTTTAT | -7_6-6_internal_loop- | −7 | 22 |
| | | 0.100.50 | CCGGCGAGTACAGCAGTTC | symmetric_AUUGCU-UCGUUG, -3_1- | | |
| | | | GGAGGAATCCCGAGGTCTC | 1_wobble_U-G, -2_1-1_mismatch_A-A, | | |
| | | | GTTGCTTTGCAATGATGGCA | 0_1-1_mismatch_A-C, 2_1- | | |
| | | | GCATTGGGATACAGTGTGA | 1_mismatch_C-C, 6_1-1_mismatch_G- | | |
| | | | AAA | G, 10_3-3_bulge-symmetric_AGU- | | |
| | | | | UCG, 22_6-6_internal_loop- | | |
| | | | | symmetric_GAAUGG-GGCGAG | | |
| 3034 | 105A-105C | 919 (−14, +22) | GTGCCCTCTGATGTTTTTAT | -14_6-6_internal_loop- | −14 | 22 |
| | | 0.90.50L10 | CCGGCGAGTACAGCAGTTC | symmetric_UGCAAA-CUAAGU, -3_1- | | |
| | | | GGAGGAATCCCGAGGTCAG | 1_wobble_U-G, -2_1-1_mismatch_A-A, | | |
| | | | CAATCCTAAGTATGATGGCA | 0_1-1_mismatch_A-C, 2_1- | | |
| | | | GCATTGGGATAC | 1_mismatch_C-C, 6_1-1_mismatch_G- | | |
| | | | | G, 10_3-3_bulge-symmetric_AGU- | | |
| | | | | UCG, 22_6-6_internal_loop- | | |
| | | | | symmetric_GAAUGG-GGCGAG | | |
| 3035 | 105A-105C | 919 (−14, +22) | GTGCCCTCTGATGTTTTTAT | -14_6-6_internal_loop- | −14 | 22 |
| | | 0.92.50L8 | CCGGCGAGTACAGCAGTTC | symmetric_UGCAAA-CUAAGU, -3_1- | | |
| | | | GGAGGAATCCCGAGGTCAG | 1_wobble_U-G, -2_1-1_mismatch_A-A, | | |
| | | | CAATCCTAAGTATGATGGCA | 0_1-1_mismatch_A-C, 2_1- | | |
| | | | GCATTGGGATACAG | 1_mismatch_C-C, 6_1-1_mismatch_G- | | |
| | | | | G, 10_3-3_bulge-symmetric_AGU- | | |
| | | | | UCG, 22_6-6_internal_loop- | | |
| | | | | symmetric_GAAUGG-GGCGAG | | |
| 3036 | 105A-105C | 919 (−14, +22) | GTGCCCTCTGATGTTTTTAT | -14_6-6_internal_loop- | −14 | 22 |
| | | 0.94.50L6 | CCGGCGAGTACAGCAGTTC | symmetric_UGCAAA-CUAAGU, -3_1- | | |
| | | | GGAGGAATCCCGAGGTCAG | 1_wobble_U-G, -2_1-1_mismatch_A-A, | | |
| | | | CAATCCTAAGTATGATGGCA | 0_1-1_mismatch_A-C, 2_1- | | |
| | | | GCATTGGGATACAGTG | 1_mismatch_C-C, 6_1-1_mismatch_G- | | |
| | | | | G, 10_3-3_bulge-symmetric_AGU- | | |
| | | | | UCG, 22_6-6_internal_loop- | | |
| | | | | symmetric_GAAUGG-GGCGAG | | |
| 3037 | 105A-105C | 919 (−14, +22) | GTGCCCTCTGATGTTTTTAT | -14_6-6_internal_loop- | −14 | 22 |
| | | 0.96.50L4 | CCGGCGAGTACAGCAGTTC | symmetric_UGCAAA-CUAAGU, -3_1- | | |
| | | | GGAGGAATCCCGAGGTCAG | 1_wobble_U-G, -2_1-1_mismatch_A-A, | | |
| | | | CAATCCTAAGTATGATGGCA | 0_1-1_mismatch_A-C, 2_1- | | |
| | | | GCATTGGGATACAGTGTG | 1_mismatch_C-C, 6_1-1_mismatch_G- | | |
| | | | | G, 10_3-3_bulge-symmetric_AGU- | | |
| | | | | UCG, 22_6-6_internal_loop- | | |
| | | | | symmetric_GAAUGG-GGCGAG | | |
| 3038 | 105A-105C | 919 (−14, +22) | GTGCCCTCTGATGTTTTTAT | -14_6-6_internal_loop- | −14 | 22 |
| | | 0.98.50L2 | CCGGCGAGTACAGCAGTTC | symmetric_UGCAAA-CUAAGU, -3_1- | | |
| | | | GGAGGAATCCCGAGGTCAG | 1_wobble_U-G, -2_1-1_mismatch_A-A, | | |
| | | | CAATCCTAAGTATGATGGCA | 0_1-1_mismatch_A-C, 2_1- | | |
| | | | GCATTGGGATACAGTGTGA | 1_mismatch_C-C, 6_1-1_mismatch_G- | | |
| | | | A | G, 10_3-3_bulge-symmetric_AGU- | | |
| | | | | UCG, 22_6-6_internal_loop- | | |
| | | | | symmetric_GAAUGG-GGCGAG | | |
| 3039 | 105A-105C | 919 (−14, +22) | ATGTTTTTATCCGGCGAGTA | -14_6-6_internal_loop- | −14 | 22 |
| | | 0.90.40R10 | CAGCAGTTCGGAGGAATCC | symmetric_UGCAAA-CUAAGU, -3_1- | | |
| | | | CGAGGTCAGCAATCCTAAGT | 1_wobble_U-G, -2_1-1_mismatch_A-A, | | |
| | | | ATGATGGCAGCATTGGGAT | 0_1-1_mismatch_A-C, 2_1- | | |
| | | | ACAGTGTGAAAA | 1_mismatch_C-C, 6 1-1_mismatch_G- | | |
| | | | | G, 10_3-3_bulge-symmetric_AGU- | | |
| | | | | UCG, 22_6-6_internal_loop- | | |
| | | | | symmetric_GAAUGG-GGCGAG | | |
| 3040 | 105A-105C | 919 (−14, +22) | TGATGTTTTTATCCGGCGAG | -14_6-6_internal_loop- | −14 | 22 |
| | | 0.92.42R8 | TACAGCAGTTCGGAGGAAT | symmetric_UGCAAA-CUAAGU, -3_1- | | |
| | | | CCCGAGGTCAGCAATCCTAA | 1_wobble_U-G, -2_1-1_mismatch_A-A, | | |
| | | | GTATGATGGCAGCATTGGG | 0_1-1_mismatch_A-C, 2_1- | | |
| | | | ATACAGTGTGAAAA | 1_mismatch_C-C, 6_1-1_mismatch_G- | | |
| | | | | G, 10_3-3_bulge-symmetric_AGU- | | |
| | | | | UCG, 22_6-6_internal_loop- | | |
| | | | | symmetric_GAAUGG-GGCGAG | | |
| 3041 | 105A-105C | 919 (−14, +22) | TCTGATGTTTTTATCCGGCG | -14_6-6_internal_loop- | −14 | 22 |
| | | 0.94.44R6 | AGTACAGCAGTTCGGAGGA | symmetric_UGCAAA-CUAAGU, -3_1- | | |
| | | | ATCCCGAGGTCAGCAATCCT | 1_wobble_U-G, -2_1-1_mismatch_A-A, | | |
| | | | AAGTATGATGGCAGCATTG | 0_1-1_mismatch_A-C, 2_1- | | |
| | | | GGATACAGTGTGAAAA | 1_mismatch_C-C, 6_1-1_mismatch_G- | | |
| | | | | G, 10_3-3_bulge-symmetric_AGU- | | |
| | | | | UCG, 22_6-6_internal_loop- | | |
| | | | | symmetric_GAAUGG-GGCGAG | | |
| 3042 | 105A-105C | 919 (−14, +22) | CCTCTGATGTTTTTATCCGG | -14_6-6_internal_loop- | −14 | 22 |
| | | 0.96.46R4 | CGAGTACAGCAGTTCGGAG | symmetric_UGCAAA-CUAAGU, -3_1- | | |
| | | | GAATCCCGAGGTCAGCAAT | 1_wobble_U-G, -2_1-1_mismatch_A-A, | | |
| | | | CCTAAGTATGATGGCAGCAT | 0_1-1_mismatch_A-C, 2_1- | | |
| | | | TGGGATACAGTGTGAAAA | 1_mismatch_C-C, 6_1-1_mismatch_G- | | |
| | | | | G, 10_3-3_bulge-symmetric_AGU- | | |
| | | | | UCG, 22_6-6_internal_loop- | | |
| | | | | symmetric_GAAUGG-GGCGAG | | |
| 3043 | 105A-105C | 919 (−14, +22) | GCCCTCTGATGTTTTTATCC | -14_6-6_internal_loop- | −14 | 22 |
| | | 0.98.48R2 | GGCGAGTACAGCAGTTCGG | symmetric_UGCAAA-CUAAGU, -3_1- | | |
| | | | AGGAATCCCGAGGTCAGCA | 1_wobble_U-G, -2_1-1_mismatch_A-A, | | |
| | | | ATCCTAAGTATGATGGCAGC | 0_1-1_mismatch_A-C, 2_1- | | |
| | | | ATTGGGATACAGTGTGAAA | 1_mismatch_C-C, 6_1-1_mismatch_G- | | |
| | | | A | G, 10_3-3_bulge-symmetric_AGU- | | |
| | | | | UCG, 22_6-6_internal_loop- | | |
| | | | | symmetric_GAAUGG-GGCGAG | | |
| 3044 | 105A-105C | 919 (−14, +22) | GTGCCCTCTGATGTTTTTAT | -14_6-6_internal_loop- | −14 | 22 |
| | | 0.100.50 | CCGGCGAGTACAGCAGTTC | symmetric_UGCAAA-CUAAGU, -3_1- | | |
| | | | GGAGGAATCCCGAGGTCAG | 1_wobble_U-G, -2_1-1_mismatch_A-A, | | |
| | | | CAATCCTAAGTATGATGGCA | 0_1-1_mismatch_A-C, 2_1- | | |
| | | | GCATTGGGATACAGTGTGA | 1_mismatch_C-C, 6_1-1_mismatch_G- | | |
| | | | AAA | G, 10_3-3_bulge-symmetric_AGU- | | |
| | | | | UCG, 22_6-6_internal_loop- | | |
| | | | | symmetric_GAAUGG-GGCGAG | | |
| 3045 | 106A | 844 (−12, +18) | CCCTGGTGTGCCCTCTGATG | −49_1-1_wobble_U-G, -12_8- | −12 | 18 |
| | | 0.113.57 | TTTTTATCCCCATCACCCTG | 8_internal_loop- | | |
| | | | CAGTTCATAGCAATCCCGTA | symmetric_UGCAAAGA- | | |
| | | | GTCAACAACAATATCCATGA | CAAUAUCC, -8_1-1_mismatch_C-A, | | |
| | | | TGGCAGCATTGGGATACAGT | 0_1-1_mismatch_A-C, 2_1- | | |
| | | | GTGAAGAGCAGCA | 1_mismatch_C-C, 9_2-2_bulge- | | |
| | | | | symmetric_CA-AU, 12_1- | | |
| | | | | 1_mismatch_U-U, 18_6- | | |
| | | | | 6_internal_loop-symmetric_UGUAGA- | | |
| | | | | CACCCU | | |
| 3046 | 106B | 844 (−12, +26) | CCCTGGTGTGCCCTCTGATG | −49_1-1_wobble_U-G, -12_8- | −12 | 26 |
| | | 0.113.57 | TTTTTCGGAGGATTCTACGG | 8_internal_loop- | | |
| | | | CAGTTCATAGCAATCCCGTA | symmetric_UGCAAAGA- | | |
| | | | GTCAACAAGGGTCCCCATG | GGGUCCCC, -8_1-1_mismatch_C-A, | | |
| | | | ATGGCAGCATTGGGATACA | 0_1-1_mismatch_A-C, 2_1- | | |
| | | | GTGTGAAGAGCAGCA | 1_mismatch_C-C, 9_2-2_bulge- | | |
| | | | | symmetric_CA-AU, 12_1- | | |
| | | | | 1_mismatch_U-U, 18_1-1_wobble_U-G, | | |
| | | | | 26_6-6_internal_loop- | | |
| | | | | symmetric_GGGGAU-CGGAGG | | |
| 3047 | 106C | 844 (−22, +26) | CCCTGGTGTGCCCTCTGATG | −49_1-1_wobble_U-G, -19_9- | −19 | 27 |
| | | 0.113.57 | TTTTTCTAGATATTCTACGG | 9_internal_loop- | | |
| | | | CAGTTCATAGCAATCCCGTA | symmetric_GCCAUCAUU- | | |
| | | | GTCAACAATCTTTGCCATTA | CAUUAUUUG, -8_1-1_mismatch_C- | | |
| | | | TTTGAGCATTGGGATACAGT | A, 0_1-1_mismatch_A-C, 2_1- | | |
| | | | GTGAAGAGCAGCA | 1_mismatch_C-C, 9_2-2_bulge- | | |
| | | | | symmetric_CA-AU, 12_1- | | |
| | | | | 1_mismatch_U-U, 18_1-1_wobble_U-G, | | |
| | | | | 26_1-1_wobble_G-U, 27_5- | | |
| | | | | 5_internal_loop-symmetric_GGGAU- | | |
| | | | | CUAGA | | |
| 3048 | 107A | 1976 (−16, +16) | CCCTGGTGTGCCCTCTGATG | −49_1-1_wobble_U-G, -16_6- | −16 | 16 |
| | | 0.113.57 | TTTTTATCCCCATTCGAATA | 6_internal_loop-symmetric_AUUGCA- | | |
| | | | AAGTACTGAGCTATCCCGAA | CUAUUA, -8_1-1_mismatch_C-A, -4- | | |
| | | | TTCAACAATCTTCTATTAGA | >5_10-10_internal_loop- | | |
| | | | TGGCAGCATTGGGATACAGT | symmetric_CUACAGCAUU- | | |
| | | | GTGAAGAGCAGCA | UAUCCCGAAU, 16_6- | | |
| | | | | 6_internal_loop-symmetric_GCUGUA- | | |
| | | | | GAAUAA | | |
| 3049 | 107B | 1976 (−22, +16) | CCCTGGTGTGCCCTCTGATG | −49_1-1_wobble_U-G, -22_6- | −22 | 16 |
| | | 0.113.57 | TTTTTATCCCCATTCGAAAA | 6_internal_loop-symmetric_GCCAUC- | | |
| | | | AAGTACTGAGCTATCCCGAA | CAAUCA, -8_1-1_mismatch_C-A, -4- | | |
| | | | TTCAACAATCTTTGCAATCA | >5_10-10_internal_loop- | | |
| | | | ATCAAGCATTGGGATACAGT | symmetric_CUACAGCAUU- | | |
| | | | GTGAAGAGCAGCA | UAUCCCGAAU, 16_6- | | |
| | | | | 6_internal_loop-symmetric_GCUGUA- | | |
| | | | | GAAAAA | | |
| 3050 | 107C | 1976 (−22, +26) | CCCTGGTGTGCCCTCTGATG | −49_1-1_wobble_U-G, -22_6- | −22 | N/A |
| | | 0.113.57 | TTTTTCTGGTGATTCTACAA | 6_internal_loop-symmetric_GCCAUC- | | |
| | | | CAGTACTGAGCTATCCCGAA | AAGCGA, -8_1-1_mismatch_C-A, -4- | | |
| | | | TTCAACAATCTTTGCAATAA | >5_10-10_internal_loop- | | |
| | | | GCGAAGCATTGGGATACAG | symmetric_CUACAGCAUU- | | |
| | | | TGTGAAGAGCAGCA | UAUCCCGAAU, 17_1-1_mismatch_C- | | |
| | | | | A, 26_1-1_mismatch_G-G, 27_1- | | |
| | | | | 1_wobble_G-U, 28_4-4_bulge- | | |
| | | | | symmetric_GGAU-CUGG | | |
| 3051 | 108A-108C | 1976 (−22, +26) | CAGGTGCACGAAACCCTGG | -22_6-6_internal_loop- | −22 | N/A |
| | | 0.100.70 | TGTGCCCTCTGATGTTTTTCT | symmetric_GCCAUC-AAGCGA, -8_1- | | |
| | | | GGTGATTCTACAACAGTACT | 1_mismatch_C-A, -4→5_10- | | |
| | | | GAGCTATCCCGAATTCAACA | 10_internal_loop- | | |
| | | | ATCTTTGCAATAAGCGAAGC | symmetric_CUACAGCAUU- | | |
| | | | | UAUCCCGAAU, 17_1-1_mismatch_C- | | |
| | | | | A, 26_1-1_mismatch_G-G, 27_1- | | |
| | | | | 1_wobble_G-U, 28_4-4_bulge- | | |
| | | | | symmetric_GGAU-CUGG | | |
| 3052 | 108A-108C | 1976 (−22, +26) | GCACGAAACCCTGGTGTGCC | -22_6-6_internal_loop- | −22 | N/A |
| | | 0.100.65 | CTCTGATGTTTTTCTGGTGA | symmetric_GCCAUC-AAGCGA, -8_1- | | |
| | | | TTCTACAACAGTACTGAGCT | 1_mismatch_C-A, -4→5_10- | | |
| | | | ATCCCGAATTCAACAATCTT | 10_internal_loop- | | |
| | | | TGCAATAAGCGAAGCATTG | symmetric_CUACAGCAUU- | | |
| | | | G | UAUCCCGAAU, 17_1-1_mismatch_C- | | |
| | | | | A, 26_1-1_mismatch_G-G, 27_1- | | |
| | | | | 1_wobble_G-U, 28_4-4_bulge- | | |
| | | | | symmetric_GGAU-CUGG | | |
| 3053 | 108A-108C | 1976 (−22, +26) | AAACCCTGGTGTGCCCTCTG | -22_6-6_internal_loop- | −22 | N/A |
| | | 0.100.60 | ATGTTTTTCTGGTGATTCTA | symmetric_GCCAUC-AAGCGA, -8_1- | | |
| | | | CAACAGTACTGAGCTATCCC | 1_mismatch_C-A, -4→5_10- | | |
| | | | GAATTCAACAATCTTTGCAA | 10_internal_loop- | | |
| | | | TAAGCGAAGCATTGGGATA | symmetric_CUACAGCAUU- | | |
| | | | C | UAUCCCGAAU, 17_1-1_mismatch_C- | | |
| | | | | A, 26_1-1_mismatch_G-G, 27_1- | | |
| | | | | 1_wobble_G-U, 28_4-4_bulge- | | |
| | | | | symmetric_GGAU-CUGG | | |
| 3054 | 108A-108C | 1976 (−22, +26) | CTGGTGTGCCCTCTGATGTT | -22_6-6_internal_loop- | −22 | N/A |
| | | 0.100.55 | TTTCTGGTGATTCTACAACA | symmetric_GCCAUC-AAGCGA, -8_1- | | |
| | | | GTACTGAGCTATCCCGAATT | 1_mismatch_C-A, -4→5_10- | | |
| | | | CAACAATCTTTGCAATAAGC | 10_internal_loop- | | |
| | | | GAAGCATTGGGATACAGTG | symmetric_CUACAGCAUU- | | |
| | | | T | UAUCCCGAAU, 17_1-1_mismatch_C- | | |
| | | | | A, 26_1-1_mismatch_G-G, 27_1- | | |
| | | | | 1_wobble_G-U, 28_4-4_bulge- | | |
| | | | | symmetric_GGAU-CUGG | | |
| 3055 | 108A-108C | 1976 (−22, +26) | GTGCCCTCTGATGTTTTTCT | -22_6-6_internal_loop- | −22 | N/A |
| | | 0.100.50 | GGTGATTCTACAACAGTACT | symmetric_GCCAUC-AAGCGA, -8_1- | | |
| | | | GAGCTATCCCGAATTCAACA | 1_mismatch_C-A, -4→5_10- | | |
| | | | ATCTTTGCAATAAGCGAAGC | 10_internal_loop- | | |
| | | | ATTGGGATACAGTGTGAAA | symmetric_CUACAGCAUU- | | |
| | | | A | UAUCCCGAAU, 17_1-1_mismatch_C- | | |
| | | | | A, 26_1-1_mismatch_G-G, 27_1- | | |
| | | | | 1_wobble_G-U, 28_4-4_bulge- | | |
| | | | | symmetric_GGAU-CUGG | | |
| 3056 | 108A-108C | 1976 (−22, +26) | CCCTGGTGTGCCCTCTGATG | −49_1-1_wobble_U-G, -22_6- | −22 | N/A |
| | | 0.113.57 | TTTTTCTGGTGATTCTACAA | 6_internal_loop-symmetric_GCCAUC- | | |
| | | | CAGTACTGAGCTATCCCGAA | AAGCGA, -8_1-1_mismatch_C-A, -4- | | |
| | | | TTCAACAATCTTTGCAATAA | >5_10-10_internal_loop- | | |
| | | | GCGAAGCATTGGGATACAG | symmetric_CUACAGCAUU- | | |
| | | | TGTGAAGAGCAGCA | UAUCCCGAAU, 17_1-1_mismatch_C- | | |
| | | | | A, 26_1-1_mismatch_G-G, 27_1- | | |
| | | | | 1_wobble_G-U, 28_4-4_bulge- | | |
| | | | | symmetric_GGAU-CUGG | | |
| 3057 | 109A-109C | 1976 (−22, +34) | GCACGAAACCCTGGTGTGCC | -22_6-6_internal_loop- | −22 | 34 |
| | | 0.100.65 | CTCTGTACAAATTATCCCCA | symmetric_GCCAUC-AAGCGA, -8_1- | | |
| | | | TTCTACAACAGTACTGAGCT | 1_mismatch_C-A, -4→5_10- | | |
| | | | ATCCCGAATTCAACAATCTT | 10_internal_loop- | | |
| | | | TGCAATAAGCGAAGCATTG | symmetric_CUACAGCAUU- | | |
| | | | G | UAUCCCGAAU, 17_1-1_mismatch_C- | | |
| | | | | A, 34_6-6_internal_loop- | | |
| | | | | symmetric_AAACAU-UACAAA | | |
| 3058 | 109A-109C | 1976 (−22, +32) | GCACGAAACCCTGGTGTGCC | -22_6-6_internal_loop- | −22 | 32 |
| | | 0.100.65 | CTCTGATCAAAAAATCCCCA | symmetric_GCCAUC-AAGCGA, -8_1- | | |
| | | | TTCTACAACAGTACTGAGCT | 1_mismatch_C-A, -4→5 10- | | |
| | | | ATCCCGAATTCAACAATCTT | 10_internal_loop- | | |
| | | | TGCAATAAGCGAAGCATTG | symmetric_CUACAGCAUU- | | |
| | | | G | UAUCCCGAAU, 17_1-1_mismatch_C- | | |
| | | | | A, 32_6-6_internal_loop- | | |
| | | | | symmetric_AAAAAC-CAAAAA | | |
| 3059 | 109A-109C | 1976 (−22, +30) | GCACGAAACCCTGGTGTGCC | -22_6-6_internal_loop- | −22 | 30 |
| | | 0.100.65 | CTCTGATGTAAAATGCCCCA | symmetric_GCCAUC-AAGCGA, -8_1- | | |
| | | | TTCTACAACAGTACTGAGCT | 1_mismatch_C-A, -4→5_10- | | |
| | | | ATCCCGAATTCAACAATCTT | 10_internal_loop- | | |
| | | | TGCAATAAGCGAAGCATTG | symmetric_CUACAGCAUU- | | |
| | | | G | UAUCCCGAAU, 17_1-1_mismatch_C- | | |
| | | | | A, 30_6-6_internal_loop- | | |
| | | | | symmetric_AUAAAA-AAAAUG | | |
| 3060 | 109A-109C | 1976 (−22, +28) | GCACGAAACCCTGGTGTGCC | -22_6-6_internal_loop- | −22 | 28 |
| | | 0.100.65 | CTCTGATGTTTAATGGGCCA | symmetric_GCCAUC-AAGCGA, -8_1- | | |
| | | | TTCTACAACAGTACTGAGCT | 1_mismatch_C-A, -4→5_10- | | |
| | | | ATCCCGAATTCAACAATCTT | 10_internal_loop- | | |
| | | | TGCAATAAGCGAAGCATTG | symmetric_CUACAGCAUU- | | |
| | | | G | UAUCCCGAAU, 17_1-1_mismatch_C- | | |
| | | | | A, 28_6-6_internal_loop- | | |
| | | | | symmetric_GGAUAA-AAUGGG | | |
| 3061 | 109A-109C | 1976 (−22, +26) V2 | GCACGAAACCCTGGTGTGCC | -22_6-6_internal_loop- | −22 | N/A |
| | | 0.100.65 | CTCTGATGTTTTTTGGGTGA | symmetric_GCCAUC-AAGCGA, -8_1- | | |
| | | | TTCTACAACAGTACTGAGCT | 1_mismatch_C-A, -4→5_10- | | |
| | | | ATCCCGAATTCAACAATCTT | 10_internal_loop- | | |
| | | | TGCAATAAGCGAAGCATTG | symmetric_CUACAGCAUU- | | |
| | | | G | UAUCCCGAAU, 17_1-1_mismatch_C- | | |
| | | | | A, 26_1-1_mismatch_G-G, 27_1- | | |
| | | | | 1_wobble_G-U, 28_4-4_bulge- | | |
| | | | | symmetric_GGAU-UGGG | | |
| 3062 | 109A-109C | 1976 (−22, +26) | GCACGAAACCCTGGTGTGCC | -22_6-6_internal_loop- | −22 | N/A |
| | | 0.100.65 | CTCTGATGTTTTTCTGGTGA | symmetric_GCCAUC-AAGCGA, -8_1- | | |
| | | | TTCTACAACAGTACTGAGCT | 1_mismatch_C-A, -4→5_10- | | |
| | | | ATCCCGAATTCAACAATCTT | 10_internal_loop- | | |
| | | | TGCAATAAGCGAAGCATTG | symmetric_CUACAGCAUU- | | |
| | | | G | UAUCCCGAAU, 17_1-1_mismatch_C- | | |
| | | | | A, 26_1-1_mismatch_G-G, 27_1- | | |
| | | | | 1_wobble_G-U, 28_4-4_bulge- | | |
| | | | | symmetric_GGAU-CUGG | | |
| 3063 | 109A-109C | 1976 (−22, +24) | GCACGAAACCCTGGTGTGCC | -22_6-6_internal_loop- | −22 | 24 |
| | | 0.100.65 | CTCTGATGTTTTTATGGTGT | symmetric_GCCAUC-AAGCGA, -8_1- | | |
| | | | ATCTACAACAGTACTGAGCT | 1_mismatch_C-A, -4→5_10- | | |
| | | | ATCCCGAATTCAACAATCTT | 10_internal_loop- | | |
| | | | TGCAATAAGCGAAGCATTG | symmetric_CUACAGCAUU- | | |
| | | | G | UAUCCCGAAU, 17_1-1_mismatch_C- | | |
| | | | | A, 24_6-6_internal_loop- | | |
| | | | | symmetric_AUGGGG-GGUGUA | | |
| 3064 | 109A-109C | 1976 (−22, +22) | GCACGAAACCCTGGTGTGCC | -22_6-6_internal_loop- | −22 | 22 |
| | | 0.100.65 | CTCTGATGTTTTTATCCGGT | symmetric_GCCAUC-AAGCGA, -8_1- | | |
| | | | AGGTACAACAGTACTGAGC | 1_mismatch_C-A, -4→5_10- | | |
| | | | TATCCCGAATTCAACAATCT | 10_internal_loop- | | |
| | | | TTGCAATAAGCGAAGCATTG | symmetric_CUACAGCAUU- | | |
| | | | G | UAUCCCGAAU, 17_1-1_mismatch_C- | | |
| | | | | A, 22_6-6_internal_loop- | | |
| | | | | symmetric_GAAUGG-GGUAGG | | |
| 3065 | 109A-109C | 1976 (−22, +20) | GCACGAAACCCTGGTGTGCC | -22_6-6_internal_loop- | −22 | 20 |
| | | 0.100.65 | CTCTGATGTTTTTATCCCCTA | symmetric_GCCAUC-AAGCGA, -8_1- | | |
| | | | GGATCAACAGTACTGAGCT | 1_mismatch_C-A, -4→5_10- | | |
| | | | ATCCCGAATTCAACAATCTT | 10_internal_loop- | | |
| | | | TGCAATAAGCGAAGCATTG | symmetric_CUACAGCAUU- | | |
| | | | G | UAUCCCGAAU, 17_1-1_mismatch_C- | | |
| | | | | A, 20_6-6_internal_loop- | | |
| | | | | symmetric_UAGAAU-UAGGAU | | |
| 3066 | 110 | 1976 (−25, +26) | GCACGAAACCCTGGTGTGCC | -25_6-6_internal_loop- | −25 | N/A |
| | | 0.100.65 | CTCTGATGTTTTTTGGGTGA | symmetric_GCUGCC-CAAUCA, -8_1- | | |
| | | | TTCTACAACAGTACTGAGCT | 1_mismatch_C-A, -4→5_10- | | |
| | | | ATCCCGAATTCAACAATCTT | 10_internal_loop- | | |
| | | | TGCAATGATCAATCAATTGG | symmetric_CUACAGCAUU- | | |
| | | | | UAUCCCGAAU, 17_1-1_mismatch_C- | | |
| | | | | A, 26_1-1_mismatch_G-G, 27_1- | | |
| | | | | 1_wobble_G-U, 28_4-4_bulge- | | |
| | | | | symmetric_GGAU-UGGG | | |
| 3067 | 110 | 1976 (−22, +26) | GCACGAAACCCTGGTGTGCC | -22_6-6_internal_loop- | −22 | N/A |
| | | 0.100.65 | CTCTGATGTTTTTCTGGTGA | symmetric_GCCAUC-AAGCGA, -8_1- | | |
| | | | TTCTACAACAGTACTGAGCT | 1_mismatch_C-A, -4→5_10- | | |
| | | | ATCCCGAATTCAACAATCTT | 10_internal_loop- | | |
| | | | TGCAATAAGCGAAGCATTG | symmetric_CUACAGCAUU- | | |
| | | | G | UAUCCCGAAU, 17_1-1_mismatch_C- | | |
| | | | | A, 26_1-1_mismatch_G-G, 27_1- | | |
| | | | | 1_wobble_G-U, 28_4-4_bulge- | | |
| | | | | symmetric_GGAU-CUGG | | |
| 3068 | 110 | 1976 (−20, +26) | GCACGAAACCCTGGTGTGCC | −20_6-6_internal_loop- | −20 | N/A |
| | | 0.100.65 | CTCTGATGTTTTTTGGGTGA | symmetric_CAUCAU-CAAAGC, -8_1- | | |
| | | | TTCTACAACAGTACTGAGCT | 1_mismatch_C-A, -4→5_10- | | |
| | | | ATCCCGAATTCAACAATCTT | 10_internal_loop- | | |
| | | | TGCACAAAGCGCAGCATTG | symmetric_CUACAGCAUU- | | |
| | | | G | UAUCCCGAAU, 17_1-1_mismatch_C- | | |
| | | | | A, 26_1-1_mismatch_G-G, 27_1- | | |
| | | | | 1_wobble_G-U, 28_4-4_bulge- | | |
| | | | | symmetric_GGAU-UGGG | | |
| 3069 | 110 | 1976 (−18, +26) | GCACGAAACCCTGGTGTGCC | -18_6-6_internal_loop- | −18 | N/A |
| | | 0.100.65 | CTCTGATGTTTTTTGGGTGA | symmetric_UCAUUG-GUCAAU, -8_1- | | |
| | | | TTCTACAACAGTACTGAGCT | 1_mismatch_C-A, -4→5_10- | | |
| | | | ATCCCGAATTCAACAATCTT | 10_internal_loop- | | |
| | | | TGGTCAATTGGCAGCATTGG | symmetric_CUACAGCAUU- | | |
| | | | | UAUCCCGAAU, 17_1-1_mismatch_C- | | |
| | | | | A, 26_1-1_mismatch_G-G, 27_1- | | |
| | | | | 1_wobble_G-U, 28_4-4_bulge- | | |
| | | | | symmetric_GGAU-UGGG | | |
| 3070 | 110 | 1976 (−16, +26) | GCACGAAACCCTGGTGTGCC | -16_6-6_internal_loop- | −16 | N/A |
| | | 0.100.65 | CTCTGATGTTTTTTGGGTGA | symmetric_AUUGCA-AAGUCA, -8_1- | | |
| | | | TTCTACAACAGTACTGAGCT | 1_mismatch_C-A, -4→5_10- | | |
| | | | ATCCCGAATTCAACAATCTT | 10_internal_loop- | | |
| | | | AAGTCAGATGGCAGCATTG | symmetric_CUACAGCAUU- | | |
| | | | G | UAUCCCGAAU, 17_1-1_mismatch_C- | | |
| | | | | A, 26_1-1_mismatch_G-G, 27_1- | | |
| | | | | 1_wobble_G-U, 28_4-4_bulge- | | |
| | | | | symmetric_GGAU-UGGG | | |
| 3071 | 110 | 1976 (−14, +26) | GCACGAAACCCTGGTGTGCC | -14_6-6_internal_loop- | −14 | N/A |
| | | 0.100.65 | CTCTGATGTTTTTTGGGTGA | symmetric UGCAAA-AAAAGU, -8_1- | | |
| | | | TTCTACAACAGTACTGAGCT | 1_mismatch_C-A, -4→5_10- | | |
| | | | ATCCCGAATTCAACAATCAA | 10_internal_loop- | | |
| | | | AAGTATGATGGCAGCATTG | symmetric_CUACAGCAUU- | | |
| | | | G | UAUCCCGAAU, 17_1-1_mismatch_C- | | |
| | | | | A, 26_1-1_mismatch_G-G, 27_1- | | |
| | | | | 1_wobble_G-U, 28_4-4_bulge- | | |
| | | | | symmetric_GGAU-UGGG | | |
| 3072 | 111 | 1700 (−20, +26) | CCCTGGTGTGCCCTCTGATG | −49_1-1_wobble_U-G, −20_6- | −20 | 26 |
| | | 0.113.57 | TTTTTTAGGGGATTCTACCG | 6_internal_loop-symmetric_CAUCAU- | | |
| | | | CAGTACTACCCGATCCCGTA | UACUAC, 0_1-1_mismatch_A-C, 2_1- | | |
| | | | GTCAGCAATCTTTGCATACT | 1_mismatch_C-C, 5_1-1_wobble_U-G, | | |
| | | | ACGCAGCATTGGGATACAG | 7_3-3_bulge-symmetric_CUC-ACC, | | |
| | | | TGTGAAGAGCAGCA | 18_1-1_mismatch_U-C, 26_6- | | |
| | | | | 6_internal_loop-symmetric_GGGGAU- | | |
| | | | | UAGGGG | | |
| 3073 | 112A | 860 (−8, +24) | CCCTGGTGTGCCCTCTGATG | −49_1-1_wobble_U-G, -8_6- | −8 | 24 |
| | | 0.113.57 | TTTTTATGGAAAGTCTACAG | 6_internal_loop-symmetric_GAUUGC- | | |
| | | | CAGTACAGAGGACTGCCGA | CUUUGA, -3_1-1_wobble_U-G, -2_1- | | |
| | | | GGTCACTTTGATTTGCAATG | 1_mismatch_A-A, 0_1-1_mismatch_A- | | |
| | | | ATGGCAGCATTGGGATACA | C, 4_1-1_mismatch_U-C, 6_1- | | |
| | | | GTGTGAAGAGCAGCA | 1_mismatch_G-G, 10_1-1_mismatch_A- | | |
| | | | | A, 24_6-6_internal_loop- | | |
| | | | | symmetric_AUGGGG-GGAAAG | | |
| 3074 | 112B | 860 (−12, +30) | CCCTGGTGTGCCCTCTGATG | −49_1-1_wobble_U-G, -12_6- | −12 | 30 |
| | | 0.113.57 | TATGTTCCCCCATTCTACAG | 6_internal_loop-symmetric_CAAAGA- | | |
| | | | CAGTACAGAGGACTGCCGA | CGCUAA, -8_1-1_mismatch_C-C, | | |
| | | | GGTCACCAACGCTAACAAT | −3_1-1_wobble_U-G, -2_1- | | |
| | | | GATGGCAGCATTGGGATAC | 1_mismatch_A-A, 0 1-1_mismatch_A- | | |
| | | | AGTGTGAAGAGCAGCA | C, 4_1-1_mismatch_U-C, 6_1- | | |
| | | | | 1_mismatch_G-G, 10_1-1_mismatch_A- | | |
| | | | | A, 30_6-6_internal_loop- | | |
| | | | | symmetric_AUAAAA-AUGUUC | | |
| 3075 | 112C | 860 (−16, +26) | CCCTGGTGTGCCCTCTGATG | −49_1-1_wobble_U-G, -16_6- | −16 | 26 |
| | | 0.113.57 | TTTTTCGGGAGATTCTACAG | 6_internal_loop-symmetric_AUUGCA- | | |
| | | | CAGTACAGAGGACTGCCGA | GUCUAG, -8_1-1_mismatch_C-C, | | |
| | | | GGTCACCAATCTTGTCTAGG | −3_1-1_wobble U-G, -2 1- | | |
| | | | ATGGCAGCATTGGGATACA | 1_mismatch_A-A, 0_1-1_mismatch_A- | | |
| | | | GTGTGAAGAGCAGCA | C, 4_1-1_mismatch_U-C, 6_1- | | |
| | | | | 1_mismatch_G-G, 10_1-1_mismatch_A- | | |
| | | | | A, 26_6-6_internal_loop- | | |
| | | | | symmetric_GGGGAU-CGGGAG | | |
| 3076 | 112D | 860 (−20, +26) | CCCTGGTGTGCCCTCTGATG | −49_1-1_wobble_U-G, −20_6- | −20 | 26 |
| | | 0.113.57 | TTTTTTAGGGGATTCTACAG | 6_internal_loop-symmetric_CAUCAU- | | |
| | | | CAGTACAGAGGACTGCCGA | UACUAC, -8_1-1_mismatch_C-C, | | |
| | | | GGTCACCAATCTTTGCATAC | −3_1-1_wobble_U-G, -2_1- | | |
| | | | TACGCAGCATTGGGATACA | 1_mismatch_A-A, 0_1-1_mismatch_A- | | |
| | | | GTGTGAAGAGCAGCA | C, 4_1-1_mismatch_U-C, 6_1- | | |
| | | | | 1_mismatch_G-G, 10_1-1_mismatch_A- | | |
| | | | | A, 26_6-6_internal_loop- | | |
| | | | | symmetric_GGGGAU-UAGGGG | | |
| 3077 | 112E | 860 (−22, +26) | CCCTGGTGTGCCCTCTGATG | −49_1-1_wobble_U-G, -22_6- | −22 | N/A |
| | | 0.113.57 | TTTTTCTACAGATTCTACAG | 6_internal_loop-symmetric_GCCAUC- | | |
| | | | CAGTACAGAGGACTGCCGA | AACCUG, -8_1-1_mismatch_C-C, | | |
| | | | GGTCACCAATCTTTGCAATA | −3_1-1_wobble U-G, -2_1- | | |
| | | | ACCTGAGCATTGGGATACA | 1_mismatch_A-A, 0_1-1_mismatch_A- | | |
| | | | GTGTGAAGAGCAGCA | C, 4_1-1_mismatch_U-C, 6_1- | | |
| | | | | 1_mismatch_G-G, 10_1-1_mismatch_A- | | |
| | | | | A, 26_2-2_bulge-symmetric_GG-AG, | | |
| | | | | 29_3-3_bulge-symmetric_GAU-CUA | | |
| 3078 | 113 | 2108 (−10, +16) | CCCTGGTGTGCCCTCTGATG | −49_1-1_wobble_U-G, -10_6- | −10 | 16 |
| | | 0.113.57 | TTTTTATCCCCATTCGCCTG | 6_internal_loop-symmetric_AAGAUU- | | |
| | | | AGGTACTGACCAATCCCGTA | CUAGGC, -6_1-1_wobble_G-U, 0_1- | | |
| | | | GTTAGCCTAGGCTGCAATGA | 1_mismatch_A-C, 2_1-1_mismatch_C- | | |
| | | | TGGCAGCATTGGGATACAGT | C, 7_1-1_mismatch_C-C, 15_1- | | |
| | | | GTGAAGAGCAGCA | 1_wobble_U-G, 16_6-6_internal_loop- | | |
| | | | | symmetric_GCUGUA-GCCUGA | | |
| 121 | 114 | 610 (−14, +26) | CCCTGGTGTGCCCTCTGATG | −49_1-1_wobble_U-G, -14_6- | −14 | 26 |
| | | 0.113.57 | TTTTTTAGGGGATTCTACAT | 6_internal_loop-symmetric_UGCAAA- | | |
| | | | CTGTAGTGAGCAATTCCGTG | AAACGU, -4_1-1_mismatch_C-C, | | |
| | | | CTCAGCAATCAAACGTATGA | −3_1-1_wobble_U-G, 0_1- | | |
| | | | TGGCAGCATTGGGATACAGT | 1_mismatch_A-C, 2_1-1_mismatch_C- | | |
| | | | GTGAAGAGCAGCA | U, 11_1-1_mismatch_G-G, 15_1- | | |
| | | | | 1_mismatch_U-U, 17_1-1_mismatch_C- | | |
| | | | | U, 26_6-6_internal_loop- | | |
| | | | | symmetric_GGGGAU-UAGGGG | | |
| 139 | 114 | 871 (−16, +24) | CCCTGGTGTGCCCTCTGATG | −49_1-1_wobble_U-G, -16_6- | −16 | 24 |
| | | 0.113.57 | TTTTTATGGGGTGTCTACAG | 6_internal_loop-symmetric_AUUGCA- | | |
| | | | TAGGACTGAGCACTGCCGA | GAGUCG, -7_1-1_wobble_U-G, -6_1- | | |
| | | | GCTGGGCAATCTTGAGTCGG | 1_mismatch_G-G, -4_0-1_bulge- | | |
| | | | ATGGCAGCATTGGGATACA | asymmetric_-C, -2_1-0_bulge- | | |
| | | | GTGTGAAGAGCAGCA | asymmetric_A-, 0_1-1_mismatch_A-C, | | |
| | | | | 4_1-1_mismatch_U-C, 13_1- | | |
| | | | | 1_mismatch_A-G, 16_1-1_wobble_G-U, | | |
| | | | | 24_6-6_internal_loop- | | |
| | | | | symmetric_AUGGGG-GGGGUG | | |
| 166 | 114 | 919 (−12, +24) | CCCTGGTGTGCCCTCTGATG | −49_1-1_wobble_U-G, -12_6- | −12 | 24 |
| | | 0.113.57 | TTTTTATGAGGCGTCTACAG | 6_internal_loop-symmetric_CAAAGA- | | |
| | | | CAGTTCGGAGGAATCCCGA | GACUAA, -3_1-1_wobble U-G, -2_1- | | |
| | | | GGTCAGCAAGACTAACAAT | 1_mismatch_A-A, 0_1-1_mismatch_A- | | |
| | | | GATGGCAGCATTGGGATAC | C, 2_1-1_mismatch_C-C, 6 1- | | |
| | | | AGTGTGAAGAGCAGCA | 1_mismatch_G-G, 10_3-3_bulge- | | |
| | | | | symmetric_AGU-UCG, 24_6- | | |
| | | | | 6_internal_loop-symmetric_AUGGGG- | | |
| | | | | GAGGCG | | |
| 2918 | 114 | 610 (−10, +34) | AAACCCTGGTGTGCCCTCTG | -10_6-6_internal_loop- | −10 | 34 |
| | | 0.92.60 | TCCAAATTATCCCCATTCTA | symmetric_AAGAUU-UCAGAA, -4_1- | | |
| | | | CATCTGTAGTGAGCAATTCC | 1_mismatch_C-C, -3_1-1_wobble_U-G, | | |
| | | | GTGCTCAGCTCAGAATGCAA | 0_1-1_mismatch_A-C, 2_1- | | |
| | | | TGATGGCAGCAT | 1_mismatch_C-U, 11_1-1_mismatch_G- | | |
| | | | | G, 15_1-1_mismatch_U-U, 17_1- | | |
| | | | | 1_mismatch_C-U, 34_6- | | |
| | | | | 6_internal_loop-symmetric_AAACAU- | | |
| | | | | UCCAAA | | |
| 2993 | 114 | 871 (−16, +32) | CTGGTGTGCCCTCTGATCCA | -16_6-6_internal_loop- | −16 | 32 |
| | | 0.98.55 | AGCATCCCCATTCTACAGTA | symmetric_AUUGCA-GAGUCG, -7_1- | | |
| | | | GGACTGAGCACTGCCGAGC | 1_wobble_U-G, -6_1-1_mismatch_G-G, | | |
| | | | TGGGCAATCTTGAGTCGGAT | -4_0-1_bulge-asymmetric_-C, -2_1- | | |
| | | | GGCAGCATTGGGATACAGT | 0_bulge-asymmetric_A-, 0_1- | | |
| | | | | 1_mismatch_A-C, 4_1-1_mismatch_U- | | |
| | | | | C, 13_1-1_mismatch_A-G, 16_1- | | |
| | | | | 1_wobble_G-U, 32_6-6_internal_loop- | | |
| | | | | symmetric_AAAAAC-CCAAGC | | |
| 3037 | 114 | 919 (−14, +22) | GTGCCCTCTGATGTTTTTAT | -14_6-6_internal_loop- | −14 | 22 |
| | | 0.96.50 | CCGGCGAGTACAGCAGTTC | symmetric_UGCAAA-CUAAGU, -3_1- | | |
| | | | GGAGGAATCCCGAGGTCAG | 1_wobble_U-G, -2_1-1_mismatch_A-A, | | |
| | | | CAATCCTAAGTATGATGGCA | 0_1-1_mismatch_A-C, 2_1- | | |
| | | | GCATTGGGATACAGTGTG | 1_mismatch_C-C, 6_1-1_mismatch_G- | | |
| | | | | G, 10_3-3_bulge-symmetric_AGU- | | |
| | | | | UCG, 22_6-6_internal_loop- | | |
| | | | | symmetric_GAAUGG-GGCGAG | | |

[0466] As shown in FIG. 114, engineering of guide610, guide871 and guide919 produced a significant increase in editing efficiency. Thus, this example demonstrates that guide RNAs selected via high throughput screening against LRRK2 can be systematically engineered to dramatically improve their editing efficiencies by modulating the positioning of the barbell macrofootprint within the guide-target RNA scaffold.

### Example 24

In Vitro Screening of LRRK2 gRNAs Selected Using HTS

[0467] This example describes construction of an scAAV vector for in vitro screening of LRRK2 engineered guide RNAs selected using a high throughput screen (see EXAMPLE 14) and/or engineered as described in EXAMPLE 23. For this example, count919 (−14, 22)—SEQ ID NO: 3037, count871 (−16, 32)—SEQ ID NO: 2993, count2397 (−14, 28)—SEQ ID NO: 2930, count610 (−14, 34)—SEQ ID NO: 2918 and count1976 (−22, 26)—SEQ ID NO: 3052 were evaluated.

[0468] Each engineered guide RNA was cloned into an scAAV vector, as shown in FIG. 115, having a human U1 promotor (TAAGGACCAGCTTCTTTGGGAGAGAACAGACGCAGGGGCGGGAGGGAAAAAGGGAG AGGCAGACGTCACTTCCTCTTGGCGACTCTGGCAGCAGATTGGTCGGTTGAGTGGCAGA AAGGCAGACGGGGACTGGGCAAGGCACTGTCGGTGACATCACGGACAGGGCGACTTCT ATGTAGATGAGGCAGCGCAGAGGCTGCTGCTTCGCCACTTGCTGCTTCGCCACGAAGG GAGTTCCCGTGCCCTGGGAGCGGGTTCAGGACCGCTGATCGGAAGTGAGAATCCCAGC TGTGTGTCAGGGCTGGAAAGGGCTCGGGAGTGCGCGGGGCAAGTGACCGTGTGTGTAA AGAGTGAGGCGTATGAGGCTGTGTCGGGGCAGAGCCCGAAGATCTC)—SEQ ID NO: 3079 and an SmOPT sequence (AATTTTTGGAG)—SEQ ID NO: 3080 flanking each guide. Each vector was transfected into HEK293 cells, and the percent RNA editing facilitated by each engineered guide RNA via ADAR1+ADAR2 was compared to control. As shown in FIG. 116A, each engineered guide RNA transfected facilitated higher levels of editing relative to the control. Each variant was then packaged into an scAAV virus, and the ability of each guide to facilitate editing via ADAR1+ADAR2 after transduction was determined. As shown in FIG. 116B, each guide RNA displayed comparable editing when packaged as an scAAV virus via transduction as when transfected as an AAV plasmid. Following differentiation, all cell lines selected as LRRK2 in vitro models display key features of neuronal development including neurite outgrowth and cell-to-cell connections. As such, this example demonstrates repair of neuronal development in the in vitro cell model upon transfection with the scAAV vector containing engineered guide RNAs.

### Example 25

### Editing Specificity of Exemplary Engineered Guide RNAs Targeting ABCA4 G5882A Mutation (G1961E Amino Acid Mutation)

[0469] Exemplary engineered guide RNAs were screened for facilitating editing of the G5882A point mutation (G1961E amino acid mutation) in ABCA4 mRNA. Each engineered guide RNA contains latent structure that results in a micro-footprint and macro-footprint within the guide-target RNA scaffold, upon hybridization of the engineered guide RNA to the target RNA.

[0470] All polynucleotide sequences encoding for the engineered guide RNA of TABLE 14, are also encompassed herein. Further, while the engineered guide RNA sequences in TABLE 14 are provided as DNA sequences with a T substituted for each U, the corresponding RNA sequences are also encompassed herein. For reference, each structural feature is annotated as follows: position of the structural feature with a negative value indicating upstream of the target A and a positive value indicating downstream of the target A, the name of the structural feature (e.g., symmetric bulge, symmetric internal loop, asymmetric bulge, asymmetric internal loop, or mismatch), and the sequence of participating bases on the target RNA side and the guide RNA side. TABLE 14 further includes the amount of on target editing achieved via ADAR1 or ADAR2 separately, as well as ADAR1 and ADAR2. The specificity of each guide was also calculated for each engineered guide via ADAR1, ADAR2, and ADAR1+ADAR2. Specificity as provided in TABLE 14 was calculated using the formula: Specificity=(fraction on-target editing+1)/(sum(non-synonymous off-target fraction editing)). These data highlight the diverse sequence space represented by the ABCA4-targeting engineered guide RNAs of the present disclosure, which have a range of different structural features that drive sequence diversity and which exhibit high on-target editing efficiency. FIG. 117A-FIG. 117B illustrate editing of ABCA4 mRNA using exemplary guides of TABLE 14 via ADAR1.

TABLE 14
Engineered Guide RNAs with Barbells Targeting ABCA4

| SEQ | | | | | | ADAR2 | |
|---|---|---|---|---|---|---|---|
| ID | | | Engineered Guide RNAs with | ADAR1 | ADAR1 | on- | ADAR2 |
| NO | Guide Name | Structural Features (target/guide) | Barbells Targeting ABCA4 | on-target | specificity | target | specificity |
| 2729 | ABCA4-GA- | −6_6-6_internal_loop-symmetric_GCUGUG- | ATCTTGAATGTGGTTGTTTTGCCG | 0.486 | 1.442 | 0.116 | 1.077 |
| | GC_−6_30 | AAAAUG; −1->0_2-2_bulge-symmetric_GA- | GCACCATTCAACAGTTGGAGGCC | | | | |
| | | CG; 30_6-6_internal_loop- | AAAGCACTCTCCAGGGCGAACTC | | | | |
| | | symmetric_UGGGAG-ACAGUU | GGACAAAAATGCTGTCCACTGCTG | | | | |
| | | | GGCTGG | | | | |
| 2730 | ABCA4-GA- | −16_6-6_internal_loop-symmetric_CAGUGG- | ATCTTGAATGTGGTTGTTTTGCCG | 0.419 | 1.318 | 0.189 | 1.118 |
| | GC_−16_18 | GAUUAA; −1->0_2-2_bulge-symmetric_GA- | GCACCATTCACTCCCAGGAGGCGC | | | | |
| | | CG; 18_6-6_internal_loop- | ACTAACTCTCCAGGGCGAACTCGG | | | | |
| | | symmetric_GCUUUG-GCACUA | ACACACAGCCTGTGATTAACTGGG | | | | |
| | | | CTGG | | | | |
| 2731 | ABCA4-GA- | −10_6-6_internal_loop-symmetric_ACAGGC- | ATCTTGAATGTGGTTGTTTTGCCG | 0.319 | 1.286 | 0.152 | 1.113 |
| | GC_−10_26 | AGACAG; −1->0_2-2_bulge-symmetric_GA- | GCACCATTCACTCCAATCACGCCA | | | | |
| | | CG; 26_6-6_internal_loop- | AAGCACTCTCCAGGGCGAACTCG | | | | |
| | | symmetric_CUCCUG-AAUCAC | GACACACAAGACAGCCACTGCTG | | | | |
| | | | GGCTGG | | | | |
| 2732 | ABCA4-GA- | −6_6-6_internal_loop-symmetric_GCUGUG- | ATCTTGAATGTGGTTGTTTTGCCG | 0.255 | 1.206 | 0.200 | 1.150 |
| | GC_−6_34 | GCUCCA; −1->0_2-2_bulge-symmetric_GA- | GCACCAGTATAACCCAGGAGGCC | | | | |
| | | CG; 34_6-6_internal_loop- | AAAGCACTCTCCAGGGCGAACTC | | | | |
| | | symmetric_AGUGAA-GUAUAA | GGACAGCTCCACTGTCCACTGCTG | | | | |
| | | | GGCTGG | | | | |
| 2733 | ABCA4-G- | −6_6-6_internal_loop-symmetric_GCUGUG- | ATCTTGAATGTGGTTGTTTTGCCG | 0.376 | 1.310 | 0.162 | 1.080 |
| | G_−6_38 | GUAUGA; −1_1-1_mismatch_G-G; 38_6- | GCTTGGCACACTCCCAGGAGGCC | | | | |
| | | 6_internal_loop-symmetric_AAUGGU- | AAAGCACTCTCCAGGGCGAACTT | | | | |
| | | UUGGCA | GGACAGTATGACTGTCCACTGCTG | | | | |
| | | | GGCTGG | | | | |
| 2734 | ABCA4-G- | −10_6-6_internal_loop-symmetric_ACAGGC- | ATCTTGAATGTGGTTGTTTTGCCG | 0.365 | 1.324 | 0.106 | 1.066 |
| | G_−10_26 | AAGGGG; −1_1-1_mismatch_G-G; 26 6- | GCACCATTCACTCCGCATACGCCA | | | | |
| | | 6_internal_loop-symmetric_CUCCUG- | AAGCACTCTCCAGGGCGAACTTG | | | | |
| | | GCAUAC | GACACACAAAGGGGCCACTGCTG | | | | |
| | | | GGCTGG | | | | |
| 2735 | ABCA4-G- | −8_6-6_internal_loop-symmetric_AGGCUG- | ATCTTGAATGTGGTTGTTTTGCCG | 0.339 | 1.270 | 0.169 | 1.124 |
| | G_−8_34 | AUCUUG; −1_1-1_mismatch_G-G; 34_6- | GCACCAACTGTACCCAGGAGGCC | | | | |
| | | 6_internal_loop-symmetric_AGUGAA- | AAAGCACTCTCCAGGGCGAACTT | | | | |
| | | ACUGUA | GGACACAATCTTGGTCCACTGCTG | | | | |
| | | | GGCTGG | | | | |
| 2736 | ABCA4- | −14_8-7_internal_loop- | ATCTTGAATGTGGTTGTTTTGCCG | 0.431 | 1.388 | 0.382 | 1.294 |
| | fullSHAKER_ | asymmetric_CAGUGGAC-CAGAGAU; - | GCACCATTCACTCCCAGGAGGCGC | | | | |
| | −16 18 | 5_1-0_bulge-asymmetric_U-; −1->0_2- | TCCAACTCTCCAGTGAGAACTCGG | | | | |
| | | 2_bulge-symmetric_GA-CG; 6_1- | ACCACAGCCTCAGAGATCTGGGCT | | | | |
| | | 1_mismatch_G-A; 8_1-1_mismatch_C-U; | GG | | | | |
| | | 18_6-6_internal_loop-symmetric_GCUUUG- | | | | | |
| | | GCUCCA | | | | | |
| 2737 | ABCA4- | −5_7-6_internal_loop- | ATCTTGAATGTGGTTGTTTTGCCG | 0.342 | 1.286 | 0.190 | 1.141 |
| | fullSHAKER_ | asymmetric_GCUGUGU-UUUCUA; −1- | GCTATTTACACTCCCAGGAGGCCA | | | | |
| | −6_38 | >0_2-2_bulge-symmetric_GA-CG; 6_1- | AAGCACTCTCCAGTGAGAACTCG | | | | |
| | | 1_mismatch_G-A; 8_1-1_mismatch_C-U; | GACTTTCTACTGTCCACTGCTGGG | | | | |
| | | 38_6-6_internal_loop-symmetric_AAUGGU- | CTGG | | | | |
| | | UAUUUA | | | | | |
| 2738 | ABCA4- | −12_6-6_internal_loop-symmetric_GGACAG- | ATCTTGAATGTGGTTGTTTTGCCG | 0.256 | 1.210 | 0.154 | 1.101 |
| | fullSHAKER_ | GACCGA; −5_1-0_bulge-asymmetric_U-; −1- | GCACCACGAAGGCCCAGGAGGCC | | | | |
| | −12_34 | >0_2-2_bulge-symmetric_GA-CG; 6_1- | AAAGCACTCTCCAGTGAGAACTC | | | | |
| | | 1_mismatch_G-A; 8_1-1_mismatch_C-U; | GGACCACAGCGACCGAACTGCTG | | | | |
| | | 34_6-6_internal_loop-symmetric_AGUGAA- | GGCTGG | | | | |
| | | CGAAGG | | | | | |
| 2739 | ABCA4- | −10_6-6_internal_loop-symmetric_ACAGGC- | ATCTTGAATGTGGTTGTTTTGCCG | 0.147 | 1.117 | 0.152 | 1.120 |
| | fullSHAKER_ | AAGACG; −5_1-0_bulge-asymmetric_U-; −1- | GCACCATTCACTCCCAGGTTTTTC | | | | |
| | −10_22 | >0_2-2_bulge-symmetric_GA-CG; 6_1- | AAGCACTCTCCAGTGAGAACTCG | | | | |
| | | 1_mismatch_G-A; 8_1-1_mismatch_C-U; | GACCACAAAGACGCCACTGCTGG | | | | |
| | | 22_6-6_internal_loop-symmetric_UGGCCU- | GCTGG | | | | |
| | | UUUUUC | | | | | |
| 2740 | ABCA4- | −16_6-6_internal_loop-symmetric_CAGUGG- | ATCTTGAATGTGGTTGTTTTGCCG | 0.436 | 1.306 | 0.353 | 1.263 |
| | partSHAKER_ | AAUGAU; −1->0_2-2_bulge-symmetric_GA- | GCACCATTCACTCCCAGGAGGCGC | | | | |
| | −16_18 | CG; 6_1-1_mismatch_G-A; 8_1- | ACCAACTCTCCAGTGAGAACTCGG | | | | |
| | | 1_mismatch_C-U; 18_6-6_internal_loop- | ACACACAGCCTGTAATGATCTGGG | | | | |
| | | symmetric_GCUUUG-GCACCA | CTGG | | | | |
| 2741 | ABCA4- | −20_4-4_bulge-symmetric_AGCA-ACAA; | ATCTTGAATGTGGTACAGTTGCCG | 0.387 | 1.337 | 0.174 | 1.114 |
| | partSHAKER_ | −6_6-6_internal_loop-symmetric_GCUGUG- | GCTAGGGCCACTCCCAGGAGGCC | | | | |
| | −6_38_−20- | GUAAUG; −1->0_2-2_bulge-symmetric_GA- | AAAGCACTCTCCAGTGAGAACTC | | | | |
| | 52 | CG; 6_1-1_mismatch_G-A; 8_1- | GGACAGTAATGCTGTCCACACAA | | | | |
| | | 1_mismatch_C-U; 38_6-6_internal_loop- | GGGCTGG | | | | |
| | | symmetric_AAUGGU-UAGGGC; 52_4- | | | | | |
| | | 4_bulge-symmetric_AACA-ACAG | | | | | |
| 2742 | ABCA4- | −10_6-6_internal_loop-symmetric_ACAGGC- | ATCTTGAATGTGGTTGTTTTGCCG | 0.331 | 1.288 | 0.258 | 1.149 |
| | partSHAKER_ | AUGGAC; −1->0_2-2_bulge-symmetric_GA- | GCACACGACTCTCCCAGGAGGCC | | | | |
| | −10_36 | CG; 6_1-1_mismatch_G-A; 8_1- | AAAGCACTCTCCAGTGAGAACTC | | | | |
| | | 1_mismatch_C-U; 36_6-6_internal_loop- | GGACACACAATGGACCCACTGCT | | | | |
| | | symmetric_UGAAUG-ACGACU | GGGCTGG | | | | |
| 2743 | ABCA4- | −8_6-6_internal_loop-symmetric_AGGCUG- | ATCTTGAATGTGGTTGTTTTGCCG | 0.327 | 1.275 | 0.077 | 1.011 |
| | CAPSv0016_ | ACAAGA; −6_1-1_wobble_G-U; −3_1- | GCTATGGCCACTCCCAGGAGGCC | | | | |
| | −8_38 | 1_mismatch_U-U; −1_1-1_mismatch_G-G; | AAAGCACTCTCCAGGGCGAGCTT | | | | |
| | | 3_1-1_wobble_U-G; 38_6-6_internal_loop- | GGTCATAACAAGAGTCCACTGCTG | | | | |
| | | symmetric_AAUGGU-UAUGGC | GGCTGG | | | | |
| 2744 | ABCA4- | −3_7-7_internal_loop- | ATCTTGAATGTGGTTGTTTTGCCG | 0.343 | 1.278 | 0.079 | 1.025 |
| | CAPSv0016_ | symmetric_UGUGUGU-UAGUCUC; −1_1- | GCACCATTCAACGAGTGGAGGCC | | | | |
| | −4_30 | 1_mismatch_G-G; 3_1-1_wobble_U-G; 30_6- | AAAGCACTCTCCAGGGCGAGCTT | | | | |
| | | 6_internal_loop-symmetric_UGGGAG- | GGTAGTCTCGCCTGTCCACTGCTG | | | | |
| | | ACGAGU | GGCTGG | | | | |
| 2745 | ABCA4- | −12_6-6_internal_loop-symmetric_GGACAG- | ATCTTGAATGTGGTTGTTTTGCCG | 0.290 | 1.245 | 0.126 | 1.080 |
| | CAPSv0016_ | AUUUGA; −6_1-1_wobble_G-U; -3_1- | GCACCAGTGTTCCCCAGGAGGCC | | | | |
| | −12_34 | 1_mismatch_U-U; −1_1-1_mismatch_G-G; | AAAGCACTCTCCAGGGCGAGCTT | | | | |
| | | 3_1-1_wobble_U-G; 34_6-6_internal_loop- | GGTCATACAGCATTTGAACTGCTG | | | | |
| | | symmetric_AGUGAA-GUGUUC | GGCTGG | | | | |
| 2746 | ABCA4- | −6_6-6_internal_loop-symmetric_GCUGUG- | ATCTTGAATGTGGTTGTTTTGCCG | 0.290 | 1.200 | 0.171 | 1.110 |
| | CAPSv0016_ | AAGUUA; −3_1-1_mismatch_U-U; −1 1- | GCTTAGCACACTCCCAGGAGGCC | | | | |
| | −6_38 | 1_mismatch_G-G; 3_1-1_wobble_U-G; 38_6- | AAAGCACTCTCCAGGGCGAGCTT | | | | |
| | | 6_internal_loop-symmetric_AAUGGU- | GGTCAAAGTTACTGTCCACTGCTG | | | | |
| | | UUAGCA | GGCTGG | | | | |
| 2747 | ABCA4- | −6_6-6_internal_loop-symmetric_GCUGUG- | ATCTTGAATGTGGTTGTTTTGCCG | 0.307 | 1.260 | 0.094 | 1.044 |
| | CAPSv0015_ | GUUCAA; −3_1-1_mismatch_U-U; −1_1- | GCACACGCTTCTCCCAGGAGGCCA | | | | |
| | −6_36 | 1_mismatch_G-G; 3_1-1_wobble_U-G; 36_6- | AAGCACTCTCCAGGGCGAGCTTG | | | | |
| | | 6_internal_loop-symmetric_UGAAUG- | GTCAGTTCAACTGTCCACTGCTGG | | | | |
| | | ACGCUU | GCTGG | | | | |
| 2748 | ABCA4- | −20_6-6_internal_loop-symmetric_CCAGCA- | ATCTTGAATGTGGTTGTTTTGCCG | 0.277 | 0.989 | 0.102 | 1.006 |
| | CAPSv0015_ | GGGAAA; −3_1-1_mismatch_U-U; −1_1- | GCACCATTCACTCCCAGGAGGCGT | | | | |
| | −20_18 | 1_mismatch_G-G; 3_1-1_wobble_U-G; 18_6- | CTTAACTCTCCAGGGCGAGCTTGG | | | | |
| | | 6_internal_loop-symmetric_GCUUUG- | TCACACAGCCTGTCCACGGGAAA | | | | |
| | | GUCUUA | GCTGG | | | | |
| 2749 | ABCA4- | −12_6-6_internal_loop-symmetric_GGACAG- | ATCTTGAATGTGGTTGTTTTGCCG | 0.272 | 1.232 | 0.136 | 1.093 |
| | CAPSv0015_ | GACGAA; −3_1-1_mismatch_U-U; −1_1- | GCACCATTCACTCCGTCCCAGCCA | | | | |
| | −12_26 | 1_mismatch_G-G; 3_1-1_wobble_U-G; 26_6- | AAGCACTCTCCAGGGCGAGCTTG | | | | |
| | | 6_internal_loop-symmetric_CUCCUG- | GTCACACAGCGACGAAACTGCTG | | | | |
| | | GUCCCA | GGCTGG | | | | |
| 2750 | ABCA4- | −8_6-6_internal_loop-symmetric_AGGCUG- | ATCTTGAATGTGGTTGTTTTGCCG | 0.234 | 1.184 | 0.069 | 1.036 |
| | CAPSv0015_ | AACGGG; −3_1-1_mismatch_U-U; −1 1- | GCACCAAGTGGACCCAGGAGGCC | | | | |
| | −8_34 | 1_mismatch_G-G; 3_1-1_wobble_U-G; 34_6- | AAAGCACTCTCCAGGGCGAGCTT | | | | |
| | | 6_internal_loop-symmetric_AGUGAA- | GGTCACAAACGGGGTCCACTGCT | | | | |
| | | AGUGGA | GGGCTGG | | | | |
| 2751 | ABCA4- | −20_6-6_internal_loop-symmetric_CCAGCA- | ATCTTGAATGTGGTTGTTTTGCCG | 0.491 | 1.307 | 0.169 | 1.125 |
| | SHAKERv0445_ | GAUUAA; −11_1-1_mismatch_G-G; −1- | GCACCATTCACTCCCAGGAGGCAT | | | | |
| | −20_18 | >0_2-2_bulge-symmetric_GA-CG; 7_1- | TAAAACTCTCCAGGACGAACTCG | | | | |
| | | 1_mismatch_C-A; 18_6-6_internal_loop- | GACACACAGGCTGTCCACGATTA | | | | |
| | | symmetric_GCUUUG-AUUAAA | AGCTGG | | | | |
| 2752 | ABCA4- | −6_6-6_internal_loop-symmetric_GCUGUG- | ATCTTGAATGTGGTTGTTTTGCCG | 0.447 | 1.378 | 0.201 | 1.166 |
| | SHAKERv0445_ | AUUCUA; −1->0_2-2_bulge-symmetric_GA- | GCACCAAACCCACCCAGGAGGCC | | | | |
| | −6_34 | CG; 7_1-1_mismatch_C-A; 34_6- | AAAGCACTCTCCAGGACGAACTC | | | | |
| | | 6_internal_loop-symmetric_AGUGAA- | GGACAATTCTACTGTCCACTGCTG | | | | |
| | | AACCCA | GGCTGG | | | | |
| 2753 | ABCA4- | −14_6-6_internal_loop-symmetric_GUGGAC- | ATCTTGAATGTGGTTGTTTTGCCG | 0.406 | 1.363 | 0.185 | 1.139 |
| | SHAKERv0445_ | ACAUUG; −11_1-1_mismatch_G-G; −1->0_ | GCACCATTCACTCCCAGGTGAGAT | | | | |
| | −14_22 | 2-2_bulge-symmetric_GA-CG; 7_1- | AAGCACTCTCCAGGACGAACTCG | | | | |
| | | 1_mismatch_C-A; 22_6-6_internal_loop- | GACACACAGGCTACATTGTGCTGG | | | | |
| | | symmetric_UGGCCU-UGAGAU | GCTGG | | | | |
| 2754 | ABCA4- | −6_6-6_internal_loop-symmetric_GCUGUG- | ATCTTGAATGTGGTTGTTTTGCCG | 0.366 | 1.300 | 0.349 | 1.284 |
| | SHAKERv0445_ | ACGUUG; −1->0_2-2_bulge-symmetric_GA- | GCTTTTACCACTCCCAGGAGGCCA | | | | |
| | −6_38 | CG; 7_1-1_mismatch_C-A; 38_6- | AAGCACTCTCCAGGACGAACTCG | | | | |
| | | 6_internal_loop-symmetric_AAUGGU- | GACAACGTTGCTGTCCACTGCTGG | | | | |
| | | UUUUAC | GCTGG | | | | |
| 2755 | ABCA4- | −10_6-6_internal_loop-symmetric_ACAGGC- | ATCTTGAATGTGGTTGTTTTGCCG | 0.395 | 1.349 | 0.210 | 1.168 |
| | SHAKERv0445_ | UAAUUA; −1->0_2-2_bulge-symmetric_GA- | GCACCATTCACTCCCATACTTACA | | | | |
| | −10_24 | CG; 7_1-1_mismatch_C-A; 24_6- | AAGCACTCTCCAGGACGAACTCG | | | | |
| | | 6_internal_loop-symmetric_GCCUCC- | GACACACATAATTACCACTGCTGG | | | | |
| | | UACUUA | GCTGG | | | | |
| 2756 | ABCA4- | −20_6-6_internal_loop-symmetric_CCAGCA- | ATCTTGAATGTGGTTGTTTTGCCG | 0.461 | 1.015 | 0.177 | 1.116 |
| | AJUBAv0445_ | ACGACC; −10_1-1_mismatch_C-A; −1_1- | GCACCATTCACTCCCAGGAGGCGT | | | | |
| | −20_18 | 1_mismatch_G-G; 3_1-1_mismatch_U-U; | CCTAACTCTCCAGGGCGATCTTGG | | | | |
| | | 18_6-6_internal_loop-symmetric_GCUUUG- | ACACACAACCTGTCCACACGACC | | | | |
| | | GUCCUA | GCTGG | | | | |
| 2757 | ABCA4- | −6_6-6_internal_loop-symmetric_GCUGUG- | ATCTTGAATGTGGTTGTTTTGCCG | 0.379 | 1.322 | 0.104 | 1.063 |
| | AJUBAv0445_ | GUUACA; −1_1-1_mismatch_G-G; 3_1- | GCACGTTACCCTCCCAGGAGGCCA | | | | |
| | −6_36 | 1_mismatch_U-U; 36_6-6_internal_loop- | AAGCACTCTCCAGGGCGATCTTGG | | | | |
| | | symmetric_UGAAUG-GUUACC | ACAGTTACACTGTCCACTGCTGGG | | | | |
| | | | CTGG | | | | |
| 2758 | ABCA4- | −14_6-6_internal_loop-symmetric_GUGGAC- | ATCTTGAATGTGGTTGTTTTGCCG | 0.316 | 1.260 | 0.223 | 1.152 |
| | AJUBAv0445_ | CAUAGA; −10_1-1_mismatch_C-A; −1_1- | GCACCATTCACTCCCAGGAGATTC | | | | |
| | −14_20 | 1_mismatch_G-G; 3_1-1_mismatch_U-U; | TTGCACTCTCCAGGGCGATCTTGG | | | | |
| | | 20_6-6_internal_loop-symmetric_UUUGGC- | ACACACAACCTCATAGATGCTGG | | | | |
| | | AUUCUU | GCTGG | | | | |
| 2759 | ABCA4- | −8_6-6_internal_loop-symmetric_AGGCUG- | ATCTTGAATGTGGTTGTTTTGCCG | 0.371 | 1.315 | 0.247 | 1.200 |
| | AJUBAv0445_ | ACUCGG; −1_1-1_mismatch_G-G; 3_1- | GCTAAAACCACTCCCAGGAGGCC | | | | |
| | −8_38 | 1_mismatch_U-U; 38_6-6_internal_loop- | AAAGCACTCTCCAGGGCGATCTTG | | | | |
| | | symmetric_AAUGGU-UAAAAC | GACACAACTCGGGTCCACTGCTGG | | | | |
| | | | GCTGG | | | | |
| 2760 | ABCA4- | −14_6-6_internal_loop-symmetric_GUGGAC- | ATCTTGAATGTGGTTGTTTTGCCG | 0.252 | 1.207 | 0.096 | 1.051 |
| | AJUBAv0445_ | UUAAAA; −10_1-1_mismatch_C-A; −1_1- | GCACCATTCACTCCCACTTCTACA | | | | |
| | −14_24 | 1_mismatch_G-G; 3_1-1_mismatch_U-U; | AAGCACTCTCCAGGGCGATCTTGG | | | | |
| | | 24_6-6_internal_loop-symmetric_GCCUCC- | ACACACAACCTTTAAAATGCTGGG | | | | |
| | | CUUCUA | CTGG | | | | |
| 2761 | ABCA4- | −6_6-6_internal_loop-symmetric_GCUGUG- | ATCTTGAATGTGGTTGTTTTGCCG | 0.308 | 1.248 | 0.215 | 1.164 |
| | AJUBAv0445_ | GCGUUG; −1_1-1_mismatch_G-G; 3_1- | GCACCAGCCCAACCCAGGAGGCC | | | | |
| | −6_34 | 1_mismatch_U-U; 34_6-6_internal_loop- | AAAGCACTCTCCAGGGCGATCTTG | | | | |
| | | symmetric_AGUGAA-GCCCAA | GACAGCGTTGCTGTCCACTGCTGG | | | | |
| | | | GCTGG | | | | |

### Example 26

Exemplary ABCA4 Guide RNA that Facilitates Editing of ABCA4 Having a 5′ G

[0471] One of the most common missense mutations implicated in Stargardt disease is a G>A mutation (e.g., the c.5882 G>A mutation resulting in the G1961E amino acid mutaiton), which can be corrected by ADAR. However, ADAR enzymes may be generally disinclined to deaminate adenosines with an upstream 5′G, as is the case with targeting the c.5882G>A mutation.

[0472] An exemplary engineered guide RNA targeting ABCA4 0.92.62 (−15,+33) (SEQ ID NO: 101) (see also EXAMPLE 9) having a sequence of “CAGG” immediately upstream of the A/C mismatch was evaluated for the ability to facilitate ADAR-mediated RNA editing of an adenosine with a 5′G in ABCA4. Briefly, 750 ng of plasmid encoding an engineered guide RNA was delivered to HEK293 cells having an ABCA4 cDNA minigene. Data was collected 48 hours post-transfection. As shown in FIG. 118, the ABCA4 0.92.62 (−15,+33) engineered guide RNA of SEQ ID NO: 101 facilitates editing of the target adenosine at an efficiency of 55% in the presence of the 5′G.

[0473] Thus, this example demonstrates that an engineered guide RNA having a CAGG sequence motif prior to the A/C mismatch is capable of facilitating ADAR-mediated RNA editing of an ABCA4 mRNA having a 5′G directly upstream of the target adenosine.

### Example 27

### Design SERPINA1-Targeting Engineered Guide RNAs

[0474] This example describes design of SERPINA1 engineered guide RNAs having barbell macro-footprints. Engineered guide RNAs were designed using the process shown in FIG. 78 (see also EXAMPLE 23): 1. Positioning of the macro-footprint; 2. Fine-tuning of the left-barbell and right-barbell coordinates; and 3. Shortening of the guide length.

[0475] As shown in FIG. 119, engineered guide RNAs were designed by tiling the position of the barbell macro-footprint along the guide-target RNA scaffold to identify those engineered guide RNAs that facilitate the highest level of SERPINA1 editing. As shown in FIG. 119, the engineered guide RNA having a 6/6 right internal symmetric loop (“right barbell”) at position +34, a left barbell at position −12, and a centrally positioned mismatch (06566 0.100.50 (−12, +34)) facilitated an ADAR-mediated RNA editing efficiency of 24%. This macro-footprint positioning was carried forward for further engineering.

[0476] FIG. 120 shows design of the right and left barbell coordinates, as well as engineering of guide length for the 06566 engineered guide RNA.

[0477] TABLE 15 below recites the sequences of the engineered guide RNAs depicted in FIGS. 119 and 120. Polynucleotide sequences encoding the engineered guide RNA sequences in TABLE 15 are also encompassed herein.

TABLE 15
Engineered SERPINA1 Guide RNA Sequences

| SEQ | | | |
|---|---|---|---|
| ID | | | |
| NO | FIG. | Guide Name | Sequence |
| 3133 | 119 | SERP_006566_100.50_ | CAUGGGUAUGGCCUCUAAAAACAUGGCCCCUCGUCGUUC |
| | 120 | (−12_+15) | AGUCCUUACUCGUCGAUGGUCAUAAGUUCCUUAUGCACG |
| | | | GCCUUGGAGAGCUUCAGGGGUG |
| 3134 | 119 | SERP_006566_100.50_ | CAUGGGUAUGGCCUCUAAAAACAUGGCCGGUCGUGCUUC |
| | 120 | (−12_+17) | AGUCCUUACUCGUCGAUGGUCAUAAGUUCCUUAUGCACG |
| | | | GCCUUGGAGAGCUUCAGGGGUG |
| 3135 | 119 | SERP_006566_100.50_ | CAUGGGUAUGGCCUCUAAAAACAUGGAGGGUCCAGCUUC |
| | 120 | (−12_+19) | AGUCCUUACUCGUCGAUGGUCAUAAGUUCCUUAUGCACG |
| | | | GCCUUGGAGAGCUUCAGGGGUG |
| 3136 | 119 | SERP_006566_100.50_ | CAUGGGUAUGGCCUCUAAAAACAUCCAGGCAGCAGCUUC |
| | 120 | (−12_+22) | AGUCCUUACUCGUCGAUGGUCAUAAGUUCCUUAUGCACG |
| | | | GCCUUGGAGAGCUUCAGGGGUG |
| 3137 | 119 | SERP_006566_100.50_ | CAUGGGUAUGGCCUCUAAAAAGUCCCACCCAGCAGCUUC |
| | 120 | (−12_+24) | AGUCCUUACUCGUCGAUGGUCAUAAGUUCCUUAUGCACG |
| | | | GCCUUGGAGAGCUUCAGGGGUG |
| 3138 | 119 | SERP_006566_100.50_ | CAUGGGUAUGGCCUCUAAAUUGUCCGCCCCAGCAGCUUC |
| | 120 | (−12_+26) | AGUCCUUACUCGUCGAUGGUCAUAAGUUCCUUAUGCACG |
| | | | GCCUUGGAGAGCUUCAGGGGUG |
| 3139 | 119 | SERP_006566_100.50_ | CAUGGGUAUGGCCUCUAUUCCGUUGGCCCCAGCAGCUUC |
| | 120 | (−12_+28) | AGUCCUUACUCGUCGAUGGUCAUAAGUUCCUUAUGCACG |
| | | | GCCUUGGAGAGCUUCAGGGGUG |
| 3140 | 119 | SERP_006566_100.50_ | CAUGGGUAUGGCCUCGGUUCCCAUGGCCCCAGCAGCUUC |
| | 120 | (−12_+30) | AGUCCUUACUCGUCGAUGGUCAUAAGUUCCUUAUGCACG |
| | | | GCCUUGGAGAGCUUCAGGGGUG |
| 3141 | 119 | SERP_006566_100.50_ | CAUGGGUAUGGCCAGGGUUAACAUGGCCCCAGCAGCUUC |
| | 120 | (−12_+32) | AGUCCUUACUCGUCGAUGGUCAUAAGUUCCUUAUGCACG |
| | | | GCCUUGGAGAGCUUCAGGGGUG |
| 3142 | 119 | SERP_006566_100.50_ | CAUGGGUAUGGGGAGGUAAAACAUGGCCCCAGCAGCUUC |
| | 120 | (−12_+34) | AGUCCUUACUCGUCGAUGGUCAUAAGUUCCUUAUGCACG |
| | | | GCCUUGGAGAGCUUCAGGGGUG |
| 3143 | 119 | SERP_ASOTB5_85.55_ | UAGACAUGGGUAUGGCCUCUAAUUUGUAGGCCCCAGCAG |
| | 120 | (−5_+27) | CUUCAGUCCCUUACUCGUCGUACCAGAGCACAGCCAGUCG |
| | | | UAUGCACGGC |
| 3144 | 119 | SERP_006566_85.55_ | UAGACAUGGGUAUGGGGCAGUAUUCCCAUGGCCCCAGCA |
| | 120 | (−12_+34) | GCUUCAGUCCUUACUCGUCGAUGGUCAUAAGUUCCUUAU |
| | | | GCACGGC |

### Example 28

### Selection of SERPINA1 Engineered Guide RNAs for AAV Packaging

[0478] The following guides recited in TABLE 16 targeting SERPINA1 having barbell macro-footprints were selected for packaging into AAV vectors. While the engineered guide RNA sequences in TABLE 16 are provided as DNA sequences with a T substituted for each U, the corresponding RNA sequences are also encompassed herein.

TABLE 16
Exemplary guide RNAs targeting SERPINA1

| SEQ | | |
|---|---|---|
| ID | | |
| NO | Guide Name | Sequence |
| 2762 | 85.55_SERP_−5_27 | TAGACATGGGTATGGCCTCTAATTTGTAGGCCCCA |
| | | GCAGCTTCAGTCCCTTACTCGTCGTACCAGAGCAC |
| | | AGCCTTATGCACGGC |
| 2763 | 85.55_SERP-ASOTB5_−5_27 | TAGACATGGGTATGGCCTCTAATTTGTAGGCCCCA |
| | | GCAGCTTCAGTCCCTTACTCGTCGTACCAGAGCAC |
| | | AGCCAGTCGTATGCACGGC |
| 2764 | 85,55_SERP_6566_−12_34 | TAGACATGGGTATGGGGCAGTATTCCCATGGCCCC |
| | | AGCAGCTTCAGTCCTTACTCGTCGATGGTCATAAG |
| | | TTCCTTATGCACGGC |
| 2765 | 85.55_SERP-010980_−8_38 | TAGACATGGGTCACAAGTCTAAAAACAATACTAC |
| | | CCAGCAGCTTCAGTCCACCTCGTCGATGACAACGA |
| | | CAGCCTTATGCACGGC |
| 2766 | 85.55_SERP-011202_−4_38 | TAGACATGGGTCCATAGTCTAATCCATGGCTACCC |
| | | CAGCAGCTTGTCCCTTTCTCGTCACCAGACAGCAC |
| | | AGCCTTATGCACGGC |
| 2767 | 85.55_SERP-010900_−6_36 | TAGACATGGGTATATAAGGTAAAAACATGTACGC |
| | | CCCAGCCTTCAGTCCCTTCTCGTCGAACTATTGCA |
| | | CAGCCTTATGCACGGC |
| 2768 | 85.55_SERP-AC-AA_−19_27 | TAGACATGGGTATGGCCTCTAATTTGTAGGCCCCA |
| | | GCAGCTTCAGTCCCTTACTCGTCGATGGTCAGCAC |
| | | AGCGAATACCACGGC |
| 3083 | SERP-AC-AA_95-50_−10_26 | ATGGGTATGGCCTCTAAACCCCGAGCCCCAGCAG |
| | | CTTCAGTCCCTTACTCGTCGATGGTGTAAAAAGCC |
| | | TTATGCACGGCCTGGAGGGGAGAGAA |
| 3084 | SERP-AC-AA_95-50_−10_25 | ATGGGTATGGCCTCTAAAATGTCCCCCCCAGCAGC |
| | | TTCAGTCCCTTACTCGTCGATGGTGCTATAAGCCT |
| | | TATGCACGGCCTGGAGGGGAGAGAA |
| 3085 | SERP-AC-AA_95-50_−8_28 | ATGGGTATGGCCTCTACCCTGTTGGCCCCAGCAGC |
| | | TTCAGTCCCTTACTCGTCGATGAAGACGACAGCCT |
| | | TATGCACGGCCTGGAGGGGAGAGAA |
| 3086 | SERP-100.50-position_−20 | CATGGCCCCAGCAGCTTCAGTCCCTTTCTTGTCGA |
| | adenosine scan control | TGGTCAGCACAGCCCTATGCACGGCCTGGAGGGG |
| | | AGAGAAGCAGAGACACGTTGTAAGGCTGATC |

[0479] FIG. 122-FIG. 125 depict RNA editing efficiencies for guides SERP-AC-AA_95-50-10_25 (FIG. 122—SEQ ID NO: 3084); SERP-AC-AA_95-50_-8_28 (FIG. 123—SEQ ID NO: 3085); SERP-AC-AA_95-50_-10_26 (FIG. 124—SEQ ID NO: 3083) and SERP-100.50-position_-20 adenosine scan control (FIG. 125—SEQ ID NO: 3086) via ADAR.

### Example 29

### In Cell Screening of Engineered Guide RNAs Against ABCA4

[0480] A lead engineered guide RNA design of SEQ ID NO: 2772 was packaged into an AAV vector and delivered to HEK293 cells expressing the ABCA4 G1961E mutation and endogenous ADAR1, as well as ARPE-19 cells expressing the ABCA4 G1961E mutation and endogenous ADAR1 and ADAR2. 10,000 cells were plated per well in a 96-well plate and infected with 100,000 vg/dg of the scAAV2-ABCA4-Thy1.1 construct. After 48 hours, cells were harvested for analysis:
[0481] Flow cytometry to detect Thy1.1 fluorescence to assess transduction efficiency
[0482] RNA extraction→cDNA synthesis→PCR to amplify the ABCA4 target site→Sanger sequence to diagnose % editing

[0483] FIG. 126 shows the editing profile for the engineered guide RNA of SEQ ID NO: 2772 via endogenous ADAR1 for the ABCA4 target RNA in the human cells. The optimized gRNA obtained 78% editing (HEK minigene cells) and 26% editing (ARPE-19 cells) with no detectable non-synonymous bystander editing.

[0484] The data highlight the ability of the RNAfix platform the achieve robust and specific editing of a challenging 5′G target with endogenous ADAR when delivered by AAV.

### Example 30

### Editing of LRRK2 by Engineered Guide RNA Using a Broken GFP Reporter

[0485] 100 nucleotide engineered guide RNAs with an A/C mismatch at positions 25, 50, and 75 with LRRK2 guide mimicry or barbells at different positions were tested in K562 cells expressing a GFP-G67R reporter. FIG. 127 depicts a workflow for screening exemplary guide RNAs targeting LRRK2 in a broken GFP reporter system. The cells were selected by puromycin to enrich for plasmid and guide integration. The WT ADAR results were from cells captured following 14 days of puro selection and for the ADAR2 overexpression (with a weak constitutive promoter, PGK) 21 days of selection. The editing was assessed by NGS sequencing on the iSeq instrument.

[0486] TABLE 17 below recites the engineered guide RNA sequences utilized in this example. While the engineered guide RNA sequences in TABLE 17 are provided as DNA sequences with a T substituted for each U, the corresponding RNA sequences are also encompassed herein.

TABLE 17
Engineered LRRK2 Guide RNA Sequences utilized in Broken GFP Reporter
System

| SEQ | | | |
|---|---|---|---|
| ID | | | |
| NO | FIG. | Guide Name | Sequence |
| 3087 | 128 | 100.75_AC_CO1 | GCCTTCGGGCATGGCGGACTTGAAGAAGTCGTGCTGCTTCAT |
| | | | GTGGTCGGGGTAGCGGCTGAAGCACTGCACTCCGTAGGTCA |
| | | | GGGTCGTCACGAGGGTC |
| 3088 | 128 | 100.50_AC_CO1 | AAGTCGTGCTGCTTCATGTGGTCGGGGTAGCGGCTGAAGCAC |
| | | | TGCACTCCGTAGGTCAGGGTCGTCACGAGGGTCGGCCAGGG |
| | | | CACGGGCAGCTTGCCGG |
| 3089 | 128 | 100.25_AC_CO1 | GGTAGCGGCTGAAGCACTGCACTCCGTAGGTCAGGGTCGTC |
| | | | ACGAGGGTCGGCCAGGGCACGGGCAGCTTGCCGGTGGTGCA |
| | | | GATGAACTTCAGGGTCAG |
| 3090 | 128 | 0.100.75_(LRRK2_1976_ | GCCTTCGGGCATGGCGGACTTGAAGAAGTCGTGCTGCTTCAT |
| | | mimicry) | GTGGTCGGGGTAGCGCCTGAAGCACTGGACAGCCCTCGTCTG |
| | | | GGTCGTCACGAGGGTC |
| 3091 | 128 | 0.100.75_(LRRK2_919_ | GCCTTCGGGCATGGCGGACTTGAAGAAGTCGTGCTGCTTCAT |
| | | mimicry) | GTGGTCGGGGTAGCGGCTGATCAACTCCACAGCCAAGGTCA |
| | | | GGGTCGTCACGAGGGTC |
| 3092 | 128 | 0.100.75_(LRRK2_871_ | GCCTTCGGGCATGGCGGACTTGAAGAAGTCGTGCTGCTTCAT |
| | | mimicry) | GTGGTCGGGGTAGCGGCTGTAGCACTGCCCTCCCATCCACAG |
| | | | GGTCGTCACGAGGGTC |
| 3093 | 128 | 0.100.75_(LRRK2_860_ | GCCTTCGGGCATGGCGGACTTGAAGAAGTCGTGCTGCTTCAT |
| | | mimicry) | GTGGTCGGGGTAGCGGCTGAAGGACTCGTCTCCCAAGGTCTG |
| | | | GGTCGTCACGAGGGTC |
| 3094 | 128 | 0.100.50_(LRRK2_1976_ | AAGTCGTGCTGCTTCATGTGGTCGGGGTAGCGCCTGAAGCAC |
| | | mimicry) | TGGACAGCCCTCGTCTGGGTCGTCACGAGGGTCGGCCAGGG |
| | | | CACGGGCAGCTTGCCGG |
| 3095 | 128 | 0.100.50_(LRRK2_919_ | AAGTCGTGCTGCTTCATGTGGTCGGGGTAGCGGCTGATCAAC |
| | | mimicry) | TCCACAGCCAAGGTCAGGGTCGTCACGAGGGTCGGCCAGGG |
| | | | CACGGGCAGCTTGCCGG |
| 3096 | 128 | 0.100.50_(LRRK2_871_ | AAGTCGTGCTGCTTCATGTGGTCGGGGTAGCGGCTGTAGCAC |
| | | mimicry) | TGCCCTCCCATCCACAGGGTCGTCACGAGGGTCGGCCAGGGC |
| | | | ACGGGCAGCTTGCCGG |
| 3097 | 128 | 0.100.50_(LRRK2_860_ | AAGTCGTGCTGCTTCATGTGGTCGGGGTAGCGGCTGAAGGAC |
| | | mimicry) | TCGTCTCCCAAGGTCTGGGTCGTCACGAGGGTCGGCCAGGGC |
| | | | ACGGGCAGCTTGCCGG |
| 3098 | 128 | −30, +6_0.100.25 | GGTAGCGGCTGAACGTGACCACTCCGTAGGTCAGGGTCGTC |
| | | | ACGAGGGTCGGCCTCCCGTCGGGCAGCTTGCCGGTGGTGCA |
| | | | GATGAACTTCAGGGTCAG |
| 3099 | 128 | −30, +5_0.100.25 | GGTAGCGGCTGAAGGTGACGACTCCGTAGGTCAGGGTCGTC |
| | | | ACGAGGGTCGGCCTCCCGTCGGGCAGCTTGCCGGTGGTGCA |
| | | | GATGAACTTCAGGGTCAG |
| 3100 | 128 | −6, +30_0.100.75 | GCCTTCGGGCATGGCGGACTTGAAGAAGTCGTGCTGCTTGTA |
| | | | CACGTCGGGGTAGCGGCTGAAGCACTGCACTCCGTAGGAGT |
| | | | CCCTCGTCACGAGGGTC |
| 3101 | 128 | −6, +30_0.100.50 | AAGTCGTGCTGCTTGTACACGTCGGGGTAGCGGCTGAAGCAC |
| | | | TGCACTCCGTAGGAGTCCCTCGTCACGAGGGTCGGCCAGGGC |
| | | | ACGGGCAGCTTGCCGG |
| 3102 | 128 | −5, +30_0.100.75 | GCCTTCGGGCATGGCGGACTTGAAGAAGTCGTGCTGCTTGTA |
| | | | CACGTCGGGGTAGCGGCTGAAGCACTGCACTCCGTAGTAATC |
| | | | CGTCGTCACGAGGGTC |

[0487] FIG. 128 depicts the editing efficiency of the exemplary guides targeting LRRK2 in the broken GFP reporter system via exogenous or endogenous ADAR.

### Example 31

### In Vivo Efficacy of an Exemplary Engineered Guide RNA Targeting SERPINA1

### In Vivo Experimental Design.

[0488] All animal procedures were performed in accordance with protocol.

[0489] The plasmid containing the 85,55_BB(−5/+27)_ASOTB5 guide sequence (SEQ ID NO: 2763-TAGACATGGGTATGGCCTCTAATTTGTAGGCCCCAGCAGCTTCAGTCCCTTACTCGT CGTACCAGAGCACAGCCAGTCGTATGCACGGC) and mCherry as transduction marker was packaged in ssAAV8 and was injected intravenously into the lateral tail vein of male mice, 8 weeks of age, at a dose of 3.74 E12 vector genomes per mouse. Mice were monitored twice per week for the duration of the experiment (4 weeks).

### Tissue Collection and Processing & Ex Vivo Readouts

[0490] On Day 28 post-injection, all study animals were euthanized. One piece of the right lobe of the liver (approximately 0.5−1 cm³ or 50-100 mg) was collected into cryovials and snap-frozen in LN2 to be processed for RNA for guide expression and detection of editing. The remainder of the whole liver was dissociated using a kit manufacturer's protocol. Dissociated liver cells were used to evaluate transduction based on mCherry expression by flow cytometry staining. FIG. 129 shows the change in body weight for each subject over the course of the 28 day study.

### Flow Cytometry for Evaluating Transduction

[0491] Dissociated liver cells were stained with Fixable Yellow viability dye, mouse CD45 and Ter 19, ASGR1, and EpCam and evaluated for transduction by mCherry expression. FIG. 130 illustrates transduction of the engineered guide RNA payload in the liver, as measured by expression of the mCherry reporter. Data collected on the Attune N×T flow cytometer and analyzed using FlowJo flow analysis software.

### RNA Extraction

[0492] RNA was extracted from cells resuspended in RNA Lysis buffer and RNA was eluted in 20 μL of elution solution. RNA was quantified and cDNA synthesized from 100 ng RNA. FIG. 131 depicts normalized quantitation of the engineered guide RNA.

### Sanger Sequencing

[0493] PCR amplification for hSERPINA1 was performed on 1:10 diluted cDNA for 35 cycles using the below primers, and post-amplification analysis performed with 1 uL of PCR product using 2% E-Gel. SERPINA1 Fwd Primer: TGTCCATTACTGGAACCTATGATCTG—SEQ ID NO: 3103 (Tm=56C) SERPINA1 Rvs Primer: GATTCACCACTTTTCCCATGAAGAG—SEQ ID NO: 3104 (Tm=56C)

[0494] FIG. 132 depicts quantitation of the amount of target adenosine editing of the SERPINA1 RNA through administration of the AAV vector encoding the engineered guide RNA targeting SERPINA1, as compared to the level of editing of the control AAV vector. As depicted in FIG. 132, the engineered guide RNA facilitated an increased in ADAR-mediated editing of the target adenosine of the SERPINA1 RNA, relative to the amount of editing achieved through administration of the control vector. Thus, this example demonstrates that administration of an AAV vector encoding an engineered guide RNA targeting SERPINA1 to a subject produces editing of the target SERPINA1 mRNA in vivo.

### Example 32

### Editing Efficiency of Exemplary Circularized Engineered Guide RNAs Targeting LRRK2

[0495] HEK cells expressing endogenous ADARs and the LRRK2 minigene were utilized for these experiments. Specifically, 20,000 cells were transfected with 750 ng of plasmid and 3 μL Trans-IT 293 by reverse transfections. Cells were harvested 48 h post transfections. All linear gRNA were in expressed in a plasmid encoded U1 SmOpt format. All circular gRNA were created by flanking the antisense sequence with ribozymes, expressed from a U6 promoter in a plasmid encoded format.

[0496] TABLE 18 below contains the sequences of the engineered guide RNAs used in this example. Underlined nucleotides in the circular gRNA denote the ribozyme, ligation stem and golden gate scar.

TABLE 18
Engineered Linear and Circularized LRRK2 Guide RNA Sequences utilized
in Example 32

| SEQ | | | |
|---|---|---|---|
| ID | | | |
| NO | FIG. | Guide Name | Sequence |
| 2993 | 133 | Linear 871_98.55 | CUGGUGUGCCCUCUGAUCCAAGCAUCCCCAUUCUACAG |
| | | | UAGGACUGAGCACUGCCGAGCUGGGCAAUCUUGAGUCG |
| | | | GAUGGCAGCAUUGGGAUACAGU |
| 3105 | 133 | Circular 871_98.55 | GGCCAUCAGUCGCCGGUCCCAAGCCCGGAUAAAAUGGG |
| | | | AGGGGGCGGGAAACCGCCUAACCAUGCCGACUGAUGGC |
| | | | AGAUAAUCUGGUGUGCCCUCUGAUCCAAGCAUCCCCAU |
| | | | UCUACAGUAGGACUGAGCACUGCCGAGCUGGGCAAUCU |
| | | | UGAGUCGGAUGGCAGCAUUGGGAUACAGUAUAUACUGC |
| | | | CAUCAGUCGGCGUGGACUGUAGAACACUGCCAAUGCCG |
| | | | GUCCCAAGCCCGGAUAAAAGUGGAGGGUACAGUCCACG |
| | | | CUUUUUUU |
| 3037 | 133 | Linear 919_96.50 | GUGCCCUCUGAUGUUUUUAUCCGGCGAGUACAGCAGUU |
| | | | CGGAGGAAUCCCGAGGUCAGCAAUCCUAAGUAUGAUGG |
| | | | CAGCAUUGGGAUACAGUGUG |
| 3106 | 133 | Circular 919_96.50 | GGCCAUCAGUCGCCGGUCCCAAGCCCGGAUAAAAUGGG |
| | | | AGGGGGGGGGAAACCGCCUAACCAUGCCGACUGAUGGC |
| | | | AGAUAAUGUGCCCUCUGAUGUUUUUAUCCGGCGAGUAC |
| | | | AGCAGUUCGGAGGAAUCCCGAGGUCAGCAAUCCUAAGU |
| | | | AUGAUGGCAGCAUUGGGAUACAGUGUGAUAUACUGCCA |
| | | | UCAGUCGGCGUGGACUGUAGAACACUGCCAAUGCCGGU |
| | | | CCCAAGCCCGGAUAAAAGUGGAGGGUACAGUCCACGCU |
| | | | UUUUUU |
| 3107 | 134B | Circular 871_198.105 | GGCCAUCAGUCGCCGGUCCCAAGCCCGGAUAAAAUGGG |
| | | | AGGGGGCGGGAAACCGCCUAACCAUGCCGACUGAUGGC |
| | | | AGAUAAUCUGUUGGUUAUAAAUGACAUUUCCUCUGGCA |
| | | | ACUUCAGGUGCACGAAACCCUGGUGUGCCCUCUGAUCC |
| | | | AAGCAUCCCCAUUCUACAGUAGGACUGAGCACUGCCGA |
| | | | GCUGGGCAAUCUUGAGUCGGAUGGCAGCAUUGGGAUAC |
| | | | AGUGUGAAAAGCAGCACAUUGUGGGGUUUCAGGUAUCG |
| | | | GUAUAUAAUCAUGGCAUAUACUGCCAUCAGUCGGCGUG |
| | | | GACUGUAGAACACUGCCAAUGCCGGUCCCAAGCCCGGA |
| | | | UAAAAGUGGAGGGUACAGUCCACGCUUUUUUU |
| 3108 | 134B | Circular 871_198.105_4 | GGCCAUCAGUCGCCGGUCCCAAGCCCGGAUAAAAUGGG |
| | | | AGGGGGCGGGAAACCGCCUAACCAUGCCGACUGAUGGC |
| | | | AGAUAAUCUGUUGGUUAUAAAUGACAUUUCCUGACCGU |
| | | | ACUUCAGGUGCACGAUUGGGAGGUGUGCCCUCUGAUCC |
| | | | AAGCAUCCCCAUUCUACAGUAGGACUGAGCACUGCCGA |
| | | | GCUGGGCAAUCUUGAGUCGGAUGGCAGCAUUGGGUAUG |
| | | | UCUGUGAAAAGCAGCACUAACACGGGUUUCAGGUAUCG |
| | | | GUAUAUAAUCAUGGCAUAUACUGCCAUCAGUCGGCGUG |
| | | | GACUGUAGAACACUGCCAAUGCCGGUCCCAAGCCCGGA |
| | | | UAAAAGUGGAGGGUACAGUCCACGCUUUUUUU |
| 3109 | 134B | Circular 919_196.100 | GGCCAUCAGUCGCCGGUCCCAAGCCCGGAUAAAAUGGG |
| | | | AGGGGGCGGGAAACCGCCUAACCAUGCCGACUGAUGGC |
| | | | AGAUAAUGGUUAUAAAUGACAUUUCCUCUGGCAACUUC |
| | | | AGGUGCACGAAACCCUGGUGUGCCCUCUGAUGUUGUUA |
| | | | UCCGGCGAGUACAGCAGUUCGGAGGAAUCCCGAGGUCA |
| | | | GCAAUCCUAAGUAUGAUGGCAGCAUUGGGAUACAGUGU |
| | | | GAAAAGCAGCACAUUGUGGGGUUUCAGGUAUCGGUAUA |
| | | | UAAUCAUGGCUGAAUAUACUGCCAUCAGUCGGCGUGGA |
| | | | CUGUAGAACACUGCCAAUGCCGGUCCCAAGCCCGGAUA |
| | | | AAAGUGGAGGGUACAGUCCACGCUUUUUUU |
| 3110 | 134B | Circular 919_196.100_4 | GGCCAUCAGUCGCCGGUCCCAAGCCCGGAUAAAAUGGG |
| | | | AGGGGGCGGGAAACCGCCUAACCAUGCCGACUGAUGGC |
| | | | AGAUAAUGGUUAUAAAUGACAUUUCCUCUGGCAACUUG |
| | | | UCCACCACGAAACCCUGGUGACGGGACUGAUGUUGUUA |
| | | | UCCGGCGAGUACAGCAGUUCGGAGGAAUCCCGAGGUCA |
| | | | GCAAUCCUAAGUAUGAUGGCAGCAUUGCCUAUGAGUGU |
| | | | GAAAAGCAGCUGUAACUGGGGUUUCAGGUAUCGGUAUA |
| | | | UAAUCAUGGCUGAAUAUACUGCCAUCAGUCGGCCUGGA |
| | | | CUGUAGAACACUGCCAAUGCCGGUCCCAAGCCCGGAUA |
| | | | AAAGUGGAGGGUACAGUCCACGCUUUUUUU |
| 3111 | 134A | Circular 871_128.70 | GGCCAUCAGUCGCCGGUCCCAAGCCCGGAUAAAAUGGG |
| | | | AGGGGGCGGGAAACCGCCUAACCAUGCCGACUGAUGGC |
| | | | AGAUAAUCAGGUGCACGAAACCCUGGUGUGCCCUCUGA |
| | | | UCCAAGCAUCCCCAUUCUACAGUAGGACUGAGCACUGC |
| | | | CGAGCUGGGCAAUCUUGAGUCGGAUGGCAGCAUUGGGA |
| | | | UACAGUGUGAAAAGCAGCACAAUAUACUGCCAUCAGUC |
| | | | GGCGUGGACUGUAGAACACUGCCAAUGCCGGUCCCAAG |
| | | | CCCGGAUAAAAGUGGAGGGUACAGUCCACGCUUUUUUU |
| 3112 | 134A | Circular 871_158.85 | GGCCAUCAGUCGCCGGUCCCAAGCCCGGAUAAAAUGGG |
| | | | AGGGGGCGGGAAACCGCCUAACCAUGCCGACUGAUGGC |
| | | | AGAUAAUUUCCUCUGGCAACUUCAGGUGCACGAAACCC |
| | | | UGGUGUGCCCUCUGAUCCAAGCAUCCCCAUUCUACAGU |
| | | | AGGACUGAGCACUGCCGAGCUGGGCAAUCUUGAGUCGG |
| | | | AUGGCAGCAUUGGGAUACAGUGUGAAAAGCAGCACAUU |
| | | | GUGGGGUUUCAGGAUAUACUGCCAUCAGUCGGCGUGGA |
| | | | CUGUAGAACACUGCCAAUGCCGGUCCCAAGCCCGGAUA |
| | | | AAAGUGGAGGGUACAGUCCACGCUUUUUUU |
| 3113 | 134A | Circular 919_126.65 | GGCCAUCAGUCGCCGGUCCCAAGCCCGGAUAAAAUGGG |
| | | | AGGGGGCGGGAAACCGCCUAACCAUGCCGACUGAUGGC |
| | | | AGAUAAUGCACGAAACCCUGGUGUGCCCUCUGAUGUUG |
| | | | UUAUCCGGCGAGUACAGCAGUUCGGAGGAAUCCCGAGG |
| | | | UCAGCAAUCCUAAGUAUGAUGGCAGCAUUGGGAUACAG |
| | | | UGUGAAAAGCAGCACAUUGAUAUACUGCCAUCAGUCGG |
| | | | CGUGGACUGUAGAACACUGCCAAUGCCGGUCCCAAGCC |
| | | | CGGAUAAAAGUGGAGGGUACAGUCCACGCUUUUUUU |
| 3114 | 134A | Circular 919_156.80 | GGCCAUCAGUCGCCGGUCCCAAGCCCGGAUAAAAUGGG |
| | | | AGGGGGCGGGAAACCGCCUAACCAUGCCGACUGAUGGC |
| | | | AGAUAAUCUGGCAACUUCAGGUGCACGAAACCCUGGUG |
| | | | UGCCCUCUGAUGUUGUUAUCCGGCGAGUACAGCAGUUC |
| | | | GGAGGAAUCCCGAGGUCAGCAAUCCUAAGUAUGAUGGC |
| | | | AGCAUUGGGAUACAGUGUGAAAAGCAGCACAUUGUGGG |
| | | | GUUUCAGGUCUAUAUACUGCCAUCAGUCGGCGUGGACU |
| | | | GUAGAACACUGCCAAUGCCGGUCCCAAGCCCGGAUAAA |
| | | | AGUGGAGGGUACAGUCCACGCUUUUUUU |
| 3115 | 135 | Circular 919_196.100_2 | GGCCAUCAGUCGCCGGUCCCAAGCCCGGAUAAAAUGGG |
| | | | AGGGGGCGGGAAACCGCCUAACCAUGCCGACUGAUGGC |
| | | | AGAUAAUGGUUAUAAAUGACAUUUCCUCUGGCAACUUC |
| | | | AGGUGCACGAAACCCUGGUGACGGGACUGAUGUUGUUA |
| | | | UCCGGCGAGUACAGCAGUUCGGAGGAAUCCCGAGGUCA |
| | | | GCAAUCCUAAGUAUGAUGGCAGCAUUGCCUAUGAGUGU |
| | | | GAAAAGCAGCACAUUGUGGGGUUUCAGGUAUCGGUAUA |
| | | | UAAUCAUGGCUGAAUAUACUGCCAUCAGUCGGCGUGGA |
| | | | CUGUAGAACACUGCCAAUGCCGGUCCCAAGCCCGGAUA |
| | | | AAAGUGGAGGGUACAGUCCACGCUUUUUUU |
| 3116 | 135 | Circular | GGCCAUCAGUCGCCGGUCCCAAGCCCGGAUAAAAUGGG |
| | | 919_196.100_2_U- | AGGGGGGGGGAAACCGCCUAACCAUGCCGACUGAUGGC |
| | | deletions | AGAUAAUGGUUAUAAAUGACAUUUCCUCUGGCAACCAG |
| | | | GUGCACGAAACCCUGGUGACGGGACUGAUGUUGUUAUC |
| | | | CGGCGAGUACAGCAGUUCGGAGGAAUCCCGAGGUCAGC |
| | | | AAUCCUAAGUAUGAUGGCAGCAUUGCCUAUGAGUGUGA |
| | | | AAAGCAGCACAUUGUGGGGCAGGAUCGGAUAAAUCAUG |
| | | | GCUGAAUAUACUGCCAUCAGUCGGCGUGGACUGUAGAA |
| | | | CACUGCCAAUGCCGGUCCCAAGCCCGGAUAAAAGUGGA |
| | | | GGGUACAGUCCACGCUUUUUUU |

[0497] FIG. 133 provides a comparison between linear and circularized versions of exemplary guide RNAs guide871 and guide919 targeting LRRK2. While the editing efficiency of the circularized versions of the guide RNAs were lower than the linear counterparts, editing efficiency was increased by lengthening the circularized guide RNAs by an additional 15 nucleotides (FIG. 134A), 30 nucleotides (FIG. 134A), and 100 nucleotides (FIG. 134B). Finally, selected uridines were deleted from the circularized guide 919 to produce a U-deletion variant, and the effect of the U deletions on editing is depicted in FIG. 135.

### Example 33

### In Vivo Efficacy of AAV Vector Encoding an Engineered Guide RNA Targeting LRRK2

[0498] The scAAV vector constructed in EXAMPLE 23 was utilized in this example. Following QC validation of on-target LRRK2 G2019S editing and guide expression, the scAAV vector was packaged into scAAVDJ virus for in vivo testing in LRRK2 G2019S transgenic mice.

### Experimental Animals

[0499] Hemizygous BAC LRRK2 G2019S transgenic mice were utilized for this example (C57BL/6J-Tg(LRRK2*G2019S)2AMjff/J; Strain #018785).

### Thy1.1 Enrichment

[0500] Brain (ICV) and liver (IV) tissue samples were dissected from experimental mice and dissociated into single-cell suspensions using gentleMACS Dissociator (Miltenyi Biotec). Following dissociation, an aliquot of each sample was set aside and designated as “Pre-Enrichment”. The remainder of the samples were enriched for Thy1.1-expressing cells using CD90.1 MicroBeads (Miltenyi Biotec; Cat #130-121-273) by MACS and designated as “Post-Enrichment”.

### Sanger Sequencing/EditADAR Analysis

[0501] RNA extraction of “Pre-enrichment” and “Post-enrichment” brain and liver samples was performed using mirVana™ miRNA isolation kit (ThermoFisher) per manufacturer protocol. Synthesis of cDNA was performed using ProtoScript® II First Strand cDNA synthesis kit (NEB) per manufacturer protocol. PCR amplification of the LRRK2 G2019S target locus was performed using Q5@ High-Fidelity 2× master mix (NEB) using the following specific primers and thermocycler settings:

| Primer | Sequence |
|---|---|
| hLRRK2 | acaaagccagcctcactaga (SEQ ID NO: 3117) |
| 6020F | |
| hLRRK2 | tcaaagacctgggcagaagt (SEQ ID NO: 3118) |
| 6524R | |
| Thermo- | 98° C. - 30 s |
| cycler | [35 cycles] 98° C. - 10s, 67º C. - 30s, |
| Settings | 72° C. - 20 s |
| | 72° C. -2 min |
| | 4º C. - hold |

[0502] Following PCR amplification and gel confirmation of specific product, ExoSAP-IT™ PCR product cleanup reagent (ThermoFisher) was added to samples prior to Sanger sequencing submission. Sequencing trace files (.ab1) were analyzed via EditADAR (ShapeTX) to generate RNA editing profiles.

ddPCR Guide RNA Quantitation

[0503] cDNA synthesis of “Pre-enrichment” and “Post-enrichment” brain and liver RNA samples was performed using ProtoScript® II First Strand cDNA synthesis kit (NEB) per manufacturer protocol with the following modification—use of smOPT specific primer (5′-CAGAAAACCTGCTCCAAAAATTCCAC-3′) with oligo d(T)23 VN at 1:1 ratio. ddPCR was performed on the QX200 system (Bio-Rad) using ddPCR Supermix for Probes (No dUTP) (Bio-Rad; Cat #1863024) using the following specific ddPCR primers and probes and thermocycler settings:

| Primer / | |
|---|---|
| Probe | Sequence |
| (F) | GTGTGCCCTCTGATGTTTTTC (SEQ ID NO: 3119) |
| (R) | CCCAATGCTTCGCTTATTGC (SEQ ID NO: 3120) |
| (Probe) | /56FAM/ACAACAGTA/ZEN/CTGAGCTATCCCG/ |
| | 3IABKFQ/ (SEQ ID NO: 3121) |
| GAPDH (F) | TGTAGTTGAGGTCAATGAAGGG (SEQ ID NO: |
| | 3122) |
| GAPDH (R) | ACATCGCTCAGACACCATG (SEQ ID NO: 3123) |
| GAPDH | /5HEX/AAGGTCGGA/ZEN/GTCAACGGATTTGGTC/ |
| (Probe) | 3IABKFQ/ (SEQ ID NO: 3124) |
| Thermo- | 95° C. - 10 min |
| cycler | [40 cycles] 94° C. - 30 s (2° C./s), |
| Settings | 60° C. - 60 s (2° C./s), 72° C. - 15 s |
| | (2° C./s) |
| | 98° C. - 10 min |
| | 98° C. - 10 min |
| | 4° C. - hold |

[0504] Absolute ddPCR values for the engineered guide RNA and GAPDH were recorded as copies/uL. Guide RNA copy numbers were normalized to GAPDH copy numbers.

[0505] FIG. 136A and FIG. 136C depict the in vivo editing efficiencies for the scAAV vector encoding the engineered guide RNA targeting LRRK2, as measured in the brain (FIG. 136A) and liver (FIG. 136C). No detectable editing observed in scAAVDJ-engineered guide RNA ICV-injected mouse brain or liver tissue. EditADAR analysis and representative Sanger sequencing traces from no treatment, Thy1.1 pre-enrichment scAAVDJ-engineered guide RNA and Thy1.1 post-enrichment scAAVDJ-engineered guide RNA brain RNA samples. FIG. 136B and FIG. 136D illustrate quantitation of engineered guide RNA expression, as compared to expression of the GAPDH control, in the brain (FIG. 136B) and liver (FIG. 136D). Low levels of guide RNA expression (<1 guide RNA copy per GAPDH) in both Thy1.1 pre- and post-enrichment brain and liver samples as measured by ddPCR analysis was detected.

### Example 34

### Library Screen of SERPINA1 Targeting Guides

[0506] A library of 40 thousand short sequences (˜45 mers) targeting SERPINA1 was previously tested for in vitro editing of SERPINA1. The short sequences were grafted onto larger sequences with hairpins and/or internal loops for validation in targeting SERPINA1 and screened as a library. FIG. 137 shows the results of the library containing the short SERPINA1 targeting sequences grafted onto the larger sequences. The ADAR1 fraction edited is depicted on the Y-axis and the specificity score (taking into account only positions −9, −6, −2, 1, 3, 4, 9, 13) is depicted on the X-axis. The higher the specificity score, the lower the off-target; therefore, the more specific editing and highest ADAR 1 fraction edited designs are in the top right quadrant of the graph. The previous library of short sequences are shown in light gray. The hits from the larger grafted sequences are shown in the darker circles and the positive controls are indicated by stars.

### Exemplary Engineered Guide RNAS

[0507] The following TABLE 19 contains exemplary engineered guide RNAs utilized, for example, in the figures and examples provided in the present application. While the engineered guide RNA sequences in TABLE 19 are provided as DNA sequences with a T substituted for each U, the corresponding RNA sequences are also encompassed herein.

TABLE 19
Engineered Guide RNA Sequences

| | SEQ | | | | |
|---|---|---|---|---|---|
| | ID | Guide | | Structural Features | % RNA |
| FIG. | NO: | Name | Sequence | (target/guide) | Editing |
| FIG. 3 | 2 | 0.40.20 | AGCACTCTCCAGTGAGAACTC | 2/1 asymmetric bulge | 1.25 |
| | | | GGACCACAGCCTCCCGCTG | 1/0 asymmetric bulge | |
| | | | gtgg AATTTTTGGAG | 1 G/G mismatch | |
| | | | CAGGTTTTCTGACTTCGGTCGG | 1 A/C mismatch | |
| | | | AAAACCCCT | 3/3 symmetric bulge | |
| FIG. 3 | 3 | 0.45.25 | GCCAAAGCACTCTCCAGTGAG | 2/1 asymmetric bulge | 2.25 |
| | | | AACTCGGACCACAGCCTCCCG | 1/0 asymmetric bulge | |
| | | | CTG gtgg AATTTTTGGAG | 1 G/G mismatch | |
| | | | CAGGTTTTCTGACTTCGGTCGG | 1 A/C mismatch | |
| | | | AAAACCCCT | 3/3 symmetric bulge | |
| FIG. 3 | 4 | 0.50.30 | AGGAGGCCAAAGCACTCTCCA | 2/1 asymmetric bulge | 1.75 |
| | | | GTGAGAACTCGGACCACAGCC | 1/0 asymmetric bulge | |
| | | | TCCCGCTG gtgg | 1 G/G mismatch | |
| | | | AATTTTTGGAG | 1 A/C mismatch | |
| | | | CAGGTTTTCTGACTTCGGTCGG | 3/3 symmetric bulge | |
| | | | AAAACCCCT | | |
| FIG. 3 | 5 | 0.55.35 | CTCCCAGGAGGCCAAAGCACT | 2/1 asymmetric bulge | 2.75 |
| | | | CTCCAGTGAGAACTCGGACCA | 1/0 asymmetric bulge | |
| | | | CAGCCTCCCGCTG gtgg | 1 G/G mismatch | |
| | | | AATTTTTGGAG | 1 A/C mismatch | |
| | | | CAGGTTTTCTGACTTCGGTCGG | 3/3 symmetric bulge | |
| | | | AAAACCCCT | | |
| FIG. 3 | 6 | 0.60.40 | ATTCACTCCCAGGAGGCCAAA | 2/1 asymmetric bulge | 3.5 |
| | | | GCACTCTCCAGTGAGAACTCG | 1/0 asymmetric bulge | |
| | | | GACCACAGCCTCCCGCTG gtgg | 1 G/G mismatch | |
| | | | AATTTTTGGAG | 1 A/C mismatch | |
| | | | CAGGTTTTCTGACTTCGGTCGG | 3/3 symmetric bulge | |
| | | | AAAACCCCT | | |
| FIG. 3 | 7 | 0.65.45 | GCACCATTCACTCCCAGGAGG | 2/1 asymmetric bulge | 6.5 |
| | | | CCAAAGCACTCTCCAGTGAGA | 1/0 asymmetric bulge | |
| | | | ACTCGGACCACAGCCTCCCGC | 1 G/G mismatch | |
| | | | TG gtgg AATTTTTGGAG | 1 A/C mismatch | |
| | | | CAGGTTTTCTGACTTCGGTCGG | 3/3 symmetric bulge | |
| | | | AAAACCCCT | | |
| FIG. 3 | 8 | 0.70.50 | TGCCGGCACCATTCACTCCCA | 2/1 asymmetric bulge | 5.75 |
| | | | GGAGGCCAAAGCACTCTCCAG | 1/0 asymmetric bulge | |
| | | | TGAGAACTCGGACCACAGCCT | 1 G/G mismatch | |
| | | | CCCGCTG gtgg AATTTTTGGAG | 1 A/C mismatch | |
| | | | CAGGTTTTCTGACTTCGGTCGG | 3/3 symmetric bulge | |
| | | | AAAACCCCT | | |
| FIG. 3 | 9 | 0.75.55 | TGTATTGCCGGCACCATTCACT | 2/1 asymmetric bulge | 7.25 |
| | | | CCCAGGAGGCCAAAGCACTCT | 1/0 asymmetric bulge | |
| | | | CCAGTGAGAACTCGGACCACA | 1 G/G mismatch | |
| | | | GCCTCCCGCTG gtgg | 1 A/C mismatch | |
| | | | AATTTTTGGAG | 3/3 symmetric bulge | |
| | | | CAGGTTTTCTGACTTCGGTCGG | | |
| | | | AAAACCCCT | | |
| FIG. 3 | 10 | 0.80.60 | GTGGTTGTATTGCCGGCACCA | 2/1 asymmetric bulge | 8.75 |
| | | | TTCACTCCCAGGAGGCCAAAG | 1/0 asymmetric bulge | |
| | | | CACTCTCCAGTGAGAACTCGG | 1 G/G mismatch | |
| | | | ACCACAGCCTCCCGCTG gtgg | 1 A/C mismatch | |
| | | | AATTTTTGGAG | 3/3 symmetric bulge | |
| | | | CAGGTTTTCTGACTTCGGTCGG | | |
| | | | AAAACCCCT | | |
| FIG. 3 | 11 | 0.85.65 | TGAATGTGGTTGTATTGCCGG | 2/1 asymmetric bulge | 14 |
| | | | CACCATTCACTCCCAGGAGGC | 1/0 asymmetric bulge | |
| | | | CAAAGCACTCTCCAGTGAGAA | 1 G/G mismatch | |
| | | | CTCGGACCACAGCCTCCCGCT | 1 A/C mismatch | |
| | | | G gtgg AATTTTTGGAG | 3/3 symmetric bulge | |
| | | | CAGGTTTTCTGACTTCGGTCGG | | |
| | | | AAAACCCCT | | |
| FIG. 3 | 12 | 0.90.70 | CATCTTGAATGTGGTTGTATTG | 2/1 asymmetric bulge | 13.5 |
| | | | CCGGCACCATTCACTCCCAGG | 1/0 asymmetric bulge | |
| | | | AGGCCAAAGCACTCTCCAGTG | 1 G/G mismatch | |
| | | | AGAACTCGGACCACAGCCTCC | 1 A/C mismatch | |
| | | | CGCTG gtgg AATTTTTGGAG | 3/3 symmetric bulge | |
| | | | CAGGTTTTCTGACTTCGGTCGG | | |
| | | | AAAACCCCT | | |
| FIG. 3 | 13 | 0.95.75 | GTGAGCATCTTGAATGTGGTT | 2/1 asymmetric bulge | 10.25 |
| | | | GTATTGCCGGCACCATTCACT | 1/0 asymmetric bulge | |
| | | | CCCAGGAGGCCAAAGCACTCT | 1 G/G mismatch | |
| | | | CCAGTGAGAACTCGGACCACA | 1 A/C mismatch | |
| | | | GCCTCCCGCTG gtgg | 3/3 symmetric bulge | |
| | | | AATTTTTGGAG | | |
| | | | CAGGTTTTCTGACTTCGGTCGG | | |
| | | | AAAACCCCT | | |
| FIG. 3 | 14 | 0.100.80 | CCCCAGTGAGCATCTTGAATG | 2/1 asymmetric bulge | 9.5 |
| FIG. 20 | | | TGGTTGTATTGCCGGCACCATT | 1/0 asymmetric bulge | |
| | | | CACTCCCAGGAGGCCAAAGCA | 1 G/G mismatch | |
| | | | CTCTCCAGTGAGAACTCGGAC | 1 A/C mismatch | |
| | | | CACAGCCTCCCGCTG gtgg | 3/3 symmetric bulge | |
| | | | AATTTTTGGAG | | |
| | | | CAGGTTTTCTGACTTCGGTCGG | | |
| | | | AAAACCCCT | | |
| FIG. 4 | 15 | 0.85.65 | TGAATGTGGTTGTATTGCCGG | 2/1 asymmetric bulge | 3.5 |
| | | (−5, +39) | GTGGTATCACTCCCAGGAGGC | 4/4 symmetric bulge | |
| | | | CAAAGCACTCTCCAGTGAGAA | 1/0 asymmetric bulge | |
| | | | CTCGGACTGTTGGCTGTCGCT | 1 G/G mismatch | |
| | | | G gtgg AATTTTTGGAG | 1 A/C mismatch | |
| | | | CAGGTTTTCTGACTTCGGTCGG | 3/3 symmetric bulge | |
| | | | AAAACCCCT | 6/6 symmetric loop | |
| FIG. 4 | 16 | 0.86.65 | TGAATGTGGTTGTATTGCCGG | 2/1 asymmetric bulge | 9.6 |
| | | (−5, +36) | CACGTAAGTCTCCCAGGAGGC | 4/4 symmetric bulge | |
| | | | CAAAGCACTCTCCAGTGAGAA | 1/0 asymmetric bulge | |
| | | | CTCGGACTGTTGGCTGTCGCT | 1 G/G mismatch | |
| | | | G gtgg AATTTTTGGAG | 1 A/C mismatch | |
| | | | CAGGTTTTCTGACTTCGGTCGG | 3/3 symmetric bulge | |
| | | | AAAACCCCT | 6/6 symmetric loop | |
| FIG. 4 | 17 | 0.85.65 | TGAATGTGGTTGTATTGCCGG | 2/1 asymmetric bulge | 33.7 |
| FIG. 5 | | (−5, +33) | CACCATAGTGAGCCAGGAGGC | 4/4 symmetric bulge | |
| | | | CAAAGCACTCTCCAGTGAGAA | 1/0 asymmetric bulge | |
| | | | CTCGGACTGTTGGCTGTCGCT | 1 G/G mismatch | |
| | | | G gtgg AATTTTTGGAG | 1 A/C mismatch | |
| | | | CAGGTTTTCTGACTTCGGTCGG | 3/3 symmetric bulge | |
| | | | AAAACCCCT | 6/6 symmetric loop | |
| FIG. 4 | 18 | 0.85.65 | TGAATGTGGTTGTATTGCCGG | 2/1 asymmetric bulge | 13.2 |
| | | (−5, +30) | CACCATTCAGAGGGTGGAGGC | 4/4 symmetric bulge | |
| | | | CAAAGCACTCTCCAGTGAGAA | 1/0 asymmetric bulge | |
| | | | CTCGGACTGTTGGCTGTCGCT | 1 G/G mismatch | |
| | | | G gtgg AATTTTTGGAG | 1 A/C mismatch | |
| | | | CAGGTTTTCTGACTTCGGTCGG | 3/3 symmetric bulge | |
| | | | AAAACCCCT | 6/6 symmetric loop | |
| FIG. 4 | 19 | 0.85.65 | TGAATGTGGTTGTATTGCCGG | 2/1 asymmetric bulge | 22.8 |
| FIG. 5 | | (−5, +27) | CACCATTCACTCGGTCCTGGC | 4/4 symmetric bulge | |
| | | | CAAAGCACTCTCCAGTGAGAA | 1/0 asymmetric bulge | |
| | | | CTCGGACTGTTGGCTGTCGCT | 1 G/G mismatch | |
| | | | G gtgg AATTTTTGGAG | 1 A/C mismatch | |
| | | | CAGGTTTTCTGACTTCGGTCGG | 3/3 symmetric bulge | |
| | | | AAAACCCCT | 6/6 symmetric loop | |
| FIG. 4 | 20 | 0.85.65 | TGAATGTGGTTGTATTGCCGG | 2/1 asymmetric bulge | 15.6 |
| | | (−5, +24) | CACCATTCACTCCCACCTCCGC | 4/4 symmetric bulge | |
| | | | AAAGCACTCTCCAGTGAGAAC | 1/0 asymmetric bulge | |
| | | | TCGGACTGTTGGCTGTCGCTG | 1 G/G mismatch | |
| | | | gtgg AATTTTTGGAG | 1 A/C mismatch | |
| | | | CAGGTTTTCTGACTTCGGTCGG | 3/3 symmetric bulge | |
| | | | AAAACCCCT | 6/6 symmetric loop | |
| FIG. 4 | 21 | 0.85.65 | TGAATGTGGTTGTATTGCCGG | 2/1 asymmetric bulge | 9.5 |
| | | (−5, +20) | CACCATTCACTCCCAGGAGCG | 4/4 symmetric bulge | |
| | | | GTTTGCACTCTCCAGTGAGAA | 1/0 asymmetric bulge | |
| | | | CTCGGACTGTTGGCTGTCGCT | 1 G/G mismatch | |
| | | | G gtgg AATTTTTGGAG | 1 A/C mismatch | |
| | | | CAGGTTTTCTGACTTCGGTCGG | 3/3 symmetric bulge | |
| | | | AAAACCCCT | 6/6 symmetric loop | |
| FIG. 4 | 22 | 0.85.65 | TGAATGTGGTTGTATTGCCGG | 2/1 asymmetric bulge | 2.9 |
| | | (−5, +17) | CACCATTCACTCCCAGGAGGC | 4/4 symmetric bulge | |
| | | | CTTTCGTCTCTCCAGTGAGAAC | 1/0 asymmetric bulge | |
| | | | TCGGACTGTTGGCTGTCGCTG | 1 G/G mismatch | |
| | | | gtgg AATTTTTGGAG | 1 A/C mismatch | |
| | | | CAGGTTTTCTGACTTCGGTCGG | 3/3 symmetric bulge | |
| | | | AAAACCCCT | 6/6 symmetric loop | |
| FIG. 4 | 23 | 0.85.65 | TGAATGTGGTTGTATTGCCGG | 2/1 asymmetric bulge | 15.2 |
| FIG. 5 | | | CACCATTCACTCCCAGGAGGC | 1/0 asymmetric bulge | |
| FIG. 7 | | | CAAAGCACTCTCCAGTGAGAA | 1 G/G mismatch | |
| | | | CTCGGACCACAGCCTCCCGCT | 1 A/C mismatch | |
| | | | G gtgg AATTTTTGGAG | 3/3 symmetric bulge | |
| | | | CAGGTTTTCTGACTTCGGTCGG | | |
| | | | AAAACCCCT | | |
| FIG. 6 | 24 | 0.85.65 | TGAATGTGGTTGTTTTGCCGGC | 8/8 symmetrical loop | 46.3 |
| FIG. 7 | | (−12, +33) | ACCATAGTGAGCCAGGAGGCC | 1 G/G mismatch | |
| | | | AAAGCACTCTCCAGTGAGAAC | 1 A/C mismatch | |
| | | | TCGGACACACAGCGACAGCAC | 3/3 symmetric bulge | |
| | | | gtgg AATTTTTGGAG | 6/6 symmetric loop | |
| | | | CAGGTTTTCTGACTTCGGTCGG | | |
| | | | AAAACCCCT | | |
| FIG. 6 | 25 | 0.85.65 | TGAATGTGGTTGTTTTGCCGGC | 5/5 symmetrical loop | 38 |
| FIG. 7 | | (−11, +33) | ACCATAGTGAGCCAGGAGGCC | 1 G/G mismatch | |
| | | | AAAGCACTCTCCAGTGAGAAC | 1 A/C mismatch | |
| | | | TCGGACACACAGGGACACCAC | 3/3 symmetric bulge | |
| | | | gtgg AATTTTTGGAG | 6/6 symmetric loop | |
| | | | CAGGTTTTCTGACTTCGGTCGG | | |
| | | | AAAACCCCT | | |
| FIG. 6 | 26 | 0.85.65 | TGAATGTGGTTGTTTTGCCGGC | 5/5 symmetrical loop | 49.7 |
| FIG. 7 | | (−10, +33) | ACCATAGTGAGCCAGGAGGCC | 1 G/G mismatch | |
| FIG. 8 | | | AAAGCACTCTCCAGTGAGAAC | 1 A/C mismatch | |
| | | | TCGGACACACACGGACTCCAC | 3/3 symmetric bulge | |
| | | | gtgg AATTTTTGGAG | 6/6 symmetric loop | |
| | | | CAGGTTTTCTGACTTCGGTCGG | | |
| | | | AAAACCCCT | | |
| FIG. 6 | 27 | 0.85.65 | TGAATGTGGTTGTTTTGCCGGC | 5/5 symmetrical loop | 50.2 |
| FIG. 7 | | (−9, +33) | ACCATAGTGAGCCAGGAGGCC | 1 G/G mismatch | |
| FIG. 8 | | | AAAGCACTCTCCAGTGAGAAC | 1 A/C mismatch | |
| | | | TCGGACACACTCGGAGTCCAC | 3/3 symmetric bulge | |
| | | | gtgg AATTTTTGGAG | 6/6 symmetric loop | |
| | | | CAGGTTTTCTGACTTCGGTCGG | | |
| | | | AAAACCCCT | | |
| FIG. 6 | 28 | 0.85.65 | TGAATGTGGTTGTTTTGCCGGC | 4/4 symmetrical loop | 1.3 |
| FIG. 7 | | (−8, +33) | ACCATAGTGAGCCAGGAGGCC | 1 G/G mismatch | |
| | | | AAAGCACTCTCCAGTGAGAAC | 1 A/C mismatch | |
| | | | TCGGACACATTCGGTGTCCAC | 3/3 symmetric bulge | |
| | | | gtgg AATTTTTGGAG | 6/6 symmetric loop | |
| | | | CAGGTTTTCTGACTTCGGTCGG | | |
| | | | AAAACCCCT | | |
| FIG. 6 | 29 | 0.85.65 | TGAATGTGGTTGTTTTGCCGGC | 5/5 symmetrical loop | 42 |
| FIG. 7 | | (−7, +33) | ACCATAGTGAGCCAGGAGGCC | 1 G/G mismatch | |
| | | | AAAGCACTCTCCAGTGAGAAC | 1 A/C mismatch | |
| | | | TCGGACACTTTCGCTGTCCAC | 3/3 symmetric bulge | |
| | | | gtgg AATTTTTGGAG | 6/6 symmetric loop | |
| | | | CAGGTTTTCTGACTTCGGTCGG | | |
| | | | AAAACCCCT | | |
| FIG. 6 | 30 | 0.85.65 | TGAATGTGGTTGTTTTGCCGGC | 5/5 symmetrical loop | 34 |
| FIG. 7 | | (−6, +33) | ACCATAGTGAGCCAGGAGGCC | 1 G/G mismatch | |
| | | | AAAGCACTCTCCAGTGAGAAC | 1 A/C mismatch | |
| | | | TCGGACAGTTTCCCTGTCCAC | 3/3 symmetric bulge | |
| | | | gtgg AATTTTTGGAG | 6/6 symmetric loop | |
| | | | CAGGTTTTCTGACTTCGGTCGG | | |
| | | | AAAACCCCT | | |
| FIG. 6 | 31 | 0.85.65 | TGAATGTGGTTGTTTTGCCGGC | 3/3 symmetrical loop | 40.5 |
| FIG. 7 | | (−5, +33) | ACCATAGTGAGCCAGGAGGCC | 1 G/G mismatch | |
| FIG. 8 | | Version 3 | AAAGCACTCTCCAGTGAGAAC | 1 A/C mismatch | |
| | | | TCGGACTGTTGGCCTGTCCAC | 3/3 symmetric bulge | |
| | | | gtgg AATTTTTGGAG | 6/6 symmetric loop | |
| | | | CAGGTTTTCTGACTTCGGTCGG | | |
| | | | AAAACCCCT | | |
| FIG. 6 | 32 | 0.85.65 | TGAATGTGGTTGTATTGCCGG | 3/3 symmetrical loop | 39 |
| FIG. 7 | | (−5, +33) | CACCATAGTGAGCCAGGAGGC | 1 G/G mismatch | |
| | | Version 2 | CAAAGCACTCTCCAGTGAGAA | 1 A/C mismatch | |
| | | | CTCGGACTGTTGGCCTGTCCA | 3/3 symmetric bulge | |
| | | | C gtgg AATTTTTGGAG | 6/6 symmetric loop | |
| | | | CAGGTTTTCTGACTTCGGTCGG | | |
| | | | AAAACCCCT | | |
| FIG. 6 | 33 | 0.85.65 | TGAATGTGGTTGTATTGCCGG | 1/0 asymmetric bulge | 31.9 |
| FIG. 7 | | (−5, +33) | CACCATAGTGAGCCAGGAGGC | 4/4 symmetrical loop | |
| | | | CAAAGCACTCTCCAGTGAGAA | 1 G/G mismatch | |
| | | | CTCGGACTGTTGGCTGTCGCT | 1 A/C mismatch | |
| | | | G gtgg AATTTTTGGAG | 3/3 symmetric bulge | |
| | | | CAGGTTTTCTGACTTCGGTCGG | 6/6 symmetric loop | |
| | | | AAAACCCCT | | |
| FIG. 9 | 34 | 0.100.9 | TGAGAACTCGGACCACAGCCT | 2/1 asymmetric bulge | 0.5 |
| | | | CCCGCTGCTGGGCTGGAGGTG | 1/0 asymmetric bulge | |
| | | | CCTGGATAAATCTTGGTTAGTT | 1 G/G mismatch | |
| | | | CATGTAGCCTTAAGATGTCAG | 1 A/C mismatch | |
| | | | TATTATTTCCACCAG gtgg | 3/3 symmetric bulge | |
| | | | AATTTTTGGAG | | |
| | | | CAGGTTTTCTGACTTCGGTCGG | | |
| | | | AAAACCCCT | | |
| FIG. 9 | 35 | 0.100.12 | CAGTGAGAACTCGGACCACAG | 2/1 asymmetric bulge | 1.6 |
| | | | CCTCCCGCTGCTGGGCTGGAG | 1/0 asymmetric bulge | |
| | | | GTGCCTGGATAAATCTTGGTT | 1 G/G mismatch | |
| | | | AGTTCATGTAGCCTTAAGATG | 1 A/C mismatch | |
| | | | TCAGTATTATTTCCAC gtgg | 3/3 symmetric bulge | |
| | | | AATTTTTGGAG | | |
| | | | CAGGTTTTCTGACTTCGGTCGG | | |
| | | | AAAACCCCT | | |
| FIG. 9 | 36 | 0.100.18 | ACTCTCCAGTGAGAACTCGGA | 2/1 asymmetric bulge | 0 |
| | | | CCACAGCCTCCCGCACTGCTG | 1/0 asymmetric bulge | |
| | | | GGCTGGAGGTGCCTGGATAAA | 1 G/G mismatch | |
| | | | TCTTGGTTAGTTCATGTAGCCT | 1 A/C mismatch | |
| | | | TAAGATGTCAGTATT gtgg | 3/3 symmetric bulge | |
| | | | AATTTTTGGAG | | |
| | | | CAGGTTTTCTGACTTCGGTCGG | | |
| | | | AAAACCCCT | | |
| FIG. 9 | 37 | 0.100.20 | GCACTCTCCAGTGAGAACTCG | 2/1 asymmetric bulge | 0 |
| | | | GACCACAGCCTCCCGCTGCTG | 1/0 asymmetric bulge | |
| | | | GGCTGGAGGTGCCTGGATAAA | 1 G/G mismatch | |
| | | | TCTTGGTTAGTTCATGTAGCCT | 1 A/C mismatch | |
| | | | TAAGATGTCAGTATT gtgg | 3/3 symmetric bulge | |
| | | | AATTTTTGGAG | | |
| | | | CAGGTTTTCTGACTTCGGTCGG | | |
| | | | AAAACCCCT | | |
| FIG. 9 | 38 | 0.100.23 | AAAGCACTCTCCAGTGAGAAC | 2/1 asymmetric bulge | 0 |
| | | | TCGGACCACAGCCTCCCGCAC | 1/0 asymmetric bulge | |
| | | | TGCTGGGCTGGAGGTGCCTGG | 1 G/G mismatch | |
| | | | ATAAATCTTGGTTAGTTCATGT | 1 A/C mismatch | |
| | | | AGCCTTAAGATGTCA gtgg | 3/3 symmetric bulge | |
| | | | AATTTTTGGAG | | |
| | | | CAGGTTTTCTGACTTCGGTCGG | | |
| | | | AAAACCCCT | | |
| FIG. 9 | 39 | 0.100.25 | CCAAAGCACTCTCCAGTGAGA | 2/1 asymmetric bulge | 0 |
| | | | ACTCGGACCACAGCCTCCCGC | 1/0 asymmetric bulge | |
| | | | ACTGCTGGGCTGGAGGTGCCT | 1 G/G mismatch | |
| | | | GGATAAATCTTGGTTAGTTCA | 1 A/C mismatch | |
| | | | TGTAGCCTTAAGATGT gtgg | 3/3 symmetric bulge | |
| | | | AATTTTTGGAG | | |
| | | | CAGGTTTTCTGACTTCGGTCGG | | |
| | | | AAAACCCCT | | |
| FIG. 9 | 40 | 0.100.28 | AGGCCAAAGCACTCTCCAGTG | 2/1 asymmetric bulge | 0 |
| | | | AGAACTCGGACCACAGCCTCC | 1/0 asymmetric bulge | |
| | | | CGCACTGCTGGGCTGGAGGTG | 1 G/G mismatch | |
| | | | CCTGGATAAATCTTGGTTAGTT | 1 A/C mismatch | |
| | | | CATGTAGCCTTAAGA gtgg | 3/3 symmetric bulge | |
| | | | AATTTTTGGAG | | |
| | | | CAGGTTTTCTGACTTCGGTCGG | | |
| | | | AAAACCCCT | | |
| FIG. 9 | 41 | 0.100.30 | GGAGGCCAAAGCACTCTCCAG | 2/1 asymmetric bulge | 0 |
| | | | TGAGAACTCGGACCACAGCCT | 1/0 asymmetric bulge | |
| | | | CCCGCTGCTGGGCTGGAGGTG | 1 G/G mismatch | |
| | | | CCTGGATAAATCTTGGTTAGTT | 1 A/C mismatch | |
| | | | CATGTAGCCTTAAGA gtgg | 3/3 symmetric bulge | |
| | | | AATTTTTGGAG | | |
| | | | CAGGTTTTCTGACTTCGGTCGG | | |
| | | | AAAACCCCT | | |
| FIG. 9 | 42 | 0.100.33 | CCAGGAGGCCAAAGCACTCTC | 2/1 asymmetric bulge | 0 |
| | | | CAGTGAGAACTCGGACCACAG | 1/0 asymmetric bulge | |
| | | | CCTCCCGCACTGCTGGGCTGG | 1 G/G mismatch | |
| | | | AGGTGCCTGGATAAATCTTGG | 1 A/C mismatch | |
| | | | TTAGTTCATGTAGCCT gtgg | 3/3 symmetric bulge | |
| | | | AATTTTTGGAG | | |
| | | | CAGGTTTTCTGACTTCGGTCGG | | |
| | | | AAAACCCCT | | |
| FIG. 9 | 43 | 0.100.35 | TCCCAGGAGGCCAAAGCACTC | 2/1 asymmetric bulge | 0 |
| | | | TCCAGTGAGAACTCGGACCAC | 1/0 asymmetric bulge | |
| | | | AGCCTCCCGCACTGCTGGGCT | 1 G/G mismatch | |
| | | | GGAGGTGCCTGGATAAATCTT | 1 A/C mismatch | |
| | | | GGTTAGTTCATGTAGC gtgg | 3/3 symmetric bulge | |
| | | | AATTTTTGGAG | | |
| | | | CAGGTTTTCTGACTTCGGTCGG | | |
| | | | AAAACCCCT | | |
| FIG. 9 | 44 | 0.100.37 | ACTCCCAGGAGGCCAAAGCAC | 2/1 asymmetric bulge | 12.9 |
| | | | TCTCCAGTGAGAACTCGGACC | 1/0 asymmetric bulge | |
| | | | ACAGCCTCCCGCACTGCTGGG | 1 G/G mismatch | |
| | | | CTGGAGGTGCCTGGATAAATC | 1 A/C mismatch | |
| | | | TTGGTTAGTTCATGTA gtgg | 3/3 symmetric bulge | |
| | | | AATTTTTGGAG | | |
| | | | CAGGTTTTCTGACTTCGGTCGG | | |
| | | | AAAACCCCT | | |
| FIG. 9 | 45 | 0.100.40 | TTCACTCCCAGGAGGCCAAAG | 2/1 asymmetric bulge | 8.6 |
| | | | CACTCTCCAGTGAGAACTCGG | 1/0 asymmetric bulge | |
| | | | ACCACAGCCTCCCGCTGCTGG | 1 G/G mismatch | |
| | | | GCTGGAGGTGCCTGGATAAAT | 1 A/C mismatch | |
| | | | CTTGGTTAGTTCATGT gtgg | 3/3 symmetric bulge | |
| | | | AATTTTTGGAG | | |
| | | | CAGGTTTTCTGACTTCGGTCGG | | |
| | | | AAAACCCCT | | |
| FIG. 9 | 46 | 0.100.45 | CACCATTCACTCCCAGGAGGC | 2/1 asymmetric bulge | 8.2 |
| | | | CAAAGCACTCTCCAGTGAGAA | 1/0 asymmetric bulge | |
| | | | CTCGGACCACAGCCTCCCGCT | 1 G/G mismatch | |
| | | | GCTGGGCTGGAGGTGCCTGGA | 1 A/C mismatch | |
| | | | TAAATCTTGGTTAGTT gtgg | 3/3 symmetric bulge | |
| | | | AATTTTTGGAG | | |
| | | | CAGGTTTTCTGACTTCGGTCGG | | |
| | | | AAAACCCCT | | |
| FIG. 9 | 47 | 0.100.50 | GCCGGCACCATTCACTCCCAG | 2/1 asymmetric bulge | 6.7 |
| | | | GAGGCCAAAGCACTCTCCAGT | 1/0 asymmetric bulge | |
| | | | GAGAACTCGGACCACAGCCTC | 1 G/G mismatch | |
| | | | CCGCTGCTGGGCTGGAGGTGC | 1 A/C mismatch | |
| | | | CTGGATAAATCTTGGT gtgg | 3/3 symmetric bulge | |
| | | | AATTTTTGGAG | | |
| | | | CAGGTTTTCTGACTTCGGTCGG | | |
| | | | AAAACCCCT | | |
| FIG. 9 | 48 | 0.100.55 | GTATTGCCGGCACCATTCACT | 2/1 asymmetric bulge | 5.5 |
| | | | CCCAGGAGGCCAAAGCACTCT | 1/0 asymmetric bulge | |
| | | | CCAGTGAGAACTCGGACCACA | 1 G/G mismatch | |
| | | | GCCTCCCGCTGCTGGGCTGGA | 1 A/C mismatch | |
| | | | GGTGCCTGGATAAATC gtgg | 3/3 symmetric bulge | |
| | | | AATTTTTGGAG | | |
| | | | CAGGTTTTCTGACTTCGGTCGG | | |
| | | | AAAACCCCT | | |
| FIG. 9 | 49 | 0.100.60 | TGGTTGTATTGCCGGCACCATT | 2/1 asymmetric bulge | 13.4 |
| | | | CACTCCCAGGAGGCCAAAGCA | 1/0 asymmetric bulge | |
| | | | CTCTCCAGTGAGAACTCGGAC | 1 G/G mismatch | |
| | | | CACAGCCTCCCGCTGCTGGGC | 1 A/C mismatch | |
| | | | TGGAGGTGCCTGGAT gtgg | 3/3 symmetric bulge | |
| | | | AATTTTTGGAG | | |
| | | | CAGGTTTTCTGACTTCGGTCGG | | |
| | | | AAAACCCCT | | |
| FIG. 9 | 50 | 0.100.65 | GAATGTGGTTGTATTGCCGGC | 2/1 asymmetric bulge | 22.1 |
| | | | ACCATTCACTCCCAGGAGGCC | 1/0 asymmetric bulge | |
| | | | AAAGCACTCTCCAGTGAGAAC | 1 G/G mismatch | |
| | | | TCGGACCACAGCCTCCCGCAC | 1 A/C mismatch | |
| | | | TGCTGGGCTGGAGGTG gtgg | 3/3 symmetric bulge | |
| | | | AATTTTTGGAG | | |
| | | | CAGGTTTTCTGACTTCGGTCGG | | |
| | | | AAAACCCCT | | |
| FIG. 9 | 51 | 0.100.67 | TTGAATGTGGTTGTATTGCCG | 2/1 asymmetric bulge | 21.7 |
| | | | GCACCATTCACTCCCAGGAGG | 1/0 asymmetric bulge | |
| | | | CCAAAGCACTCTCCAGTGAGA | 1 G/G mismatch | |
| | | | ACTCGGACCACAGCCTCCCGC | 1 A/C mismatch | |
| | | | ACTGCTGGGCTGGAGG gtgg | 3/3 symmetric bulge | |
| | | | AATTTTTGGAG | | |
| | | | CAGGTTTTCTGACTTCGGTCGG | | |
| | | | AAAACCCCT | | |
| FIG. 9 | 52 | 0.100.70 | ATCTTGAATGTGGTTGTATTGC | 2/1 asymmetric bulge | 26.7 |
| | | | CGGCACCATTCACTCCCAGGA | 1/0 asymmetric bulge | |
| | | | GGCCAAAGCACTCTCCAGTGA | 1 G/G mismatch | |
| | | | GAACTCGGACCACAGCCTCCC | 1 A/C mismatch | |
| | | | GCTGCTGGGCTGGAG gtgg | 3/3 symmetric bulge | |
| | | | AATTTTTGGAG | | |
| | | | CAGGTTTTCTGACTTCGGTCGG | | |
| | | | AAAACCCCT | | |
| FIG. 9 | 53 | 0.100.72 | GCATCTTGAATGTGGTTGTATT | 2/1 asymmetric bulge | 22.1 |
| | | | GCCGGCACCATTCACTCCCAG | 1/0 asymmetric bulge | |
| | | | GAGGCCAAAGCACTCTCCAGT | 1 G/G mismatch | |
| | | | GAGAACTCGGACCACAGCCTC | 1 A/C mismatch | |
| | | | CCGCACTGCTGGGCT gtgg | 3/3 symmetric bulge | |
| | | | AATTTTTGGAG | | |
| | | | CAGGTTTTCTGACTTCGGTCGG | | |
| | | | AAAACCCCT | | |
| FIG. 9 | 54 | 0.100.75 | TGAGCATCTTGAATGTGGTTG | 2/1 asymmetric bulge | 14.5 |
| | | | TATTGCCGGCACCATTCACTCC | 1/0 asymmetric bulge | |
| | | | CAGGAGGCCAAAGCACTCTCC | 1 G/G mismatch | |
| | | | AGTGAGAACTCGGACCACAGC | 1 A/C mismatch | |
| | | | CTCCCGCACTGCTGG gtgg | 3/3 symmetric bulge | |
| | | | AATTTTTGGAG | | |
| | | | CAGGTTTTCTGACTTCGGTCGG | | |
| | | | AAAACCCCT | | |
| FIG. 9 | 55 | 0.100.78 | CAGTGAGCATCTTGAATGTGG | 2/1 asymmetric bulge | 11.3 |
| | | | TTGTATTGCCGGCACCATTCAC | 1/0 asymmetric bulge | |
| | | | TCCCAGGAGGCCAAAGCACTC | 1 G/G mismatch | |
| | | | TCCAGTGAGAACTCGGACCAC | 1 A/C mismatch | |
| | | | AGCCTCCCGCACTGC gtgg | 3/3 symmetric bulge | |
| | | | AATTTTTGGAG | | |
| | | | CAGGTTTTCTGACTTCGGTCGG | | |
| | | | AAAACCCCT | | |
| FIG. 9 | 56 | 0.100.81 | CCCCAGTGAGCATCTTGAATG | 2/1 asymmetric bulge | 14 |
| | | | TGGTTGTATTGCCGGCACCATT | 1/0 asymmetric bulge | |
| | | | CACTCCCAGGAGGCCAAAGCA | 1 G/G mismatch | |
| | | | CTCTCCAGTGAGAACTCGGAC | 1 A/C mismatch | |
| | | | CACAGCCTCCCGCTG gtgg | 3/3 symmetric bulge | |
| | | | AATTTTTGGAG | | |
| | | | CAGGTTTTCTGACTTCGGTCGG | | |
| | | | AAAACCCCT | | |
| FIG. 9 | 57 | 0.100.84 | TGTCCCCAGTGAGCATCTTGA | 2/1 asymmetric bulge | 7.9 |
| | | | ATGTGGTTGTATTGCCGGCAC | 1/0 asymmetric bulge | |
| | | | CATTCACTCCCAGGAGGCCAA | 1 G/G mismatch | |
| | | | AGCACTCTCCAGTGAGAACTC | 1 A/C mismatch | |
| | | | GGACCACAGCCTCCCG gtgg | 3/3 symmetric bulge | |
| | | | AATTTTTGGAG | | |
| | | | CAGGTTTTCTGACTTCGGTCGG | | |
| | | | AAAACCCCT | | |
| FIG. 10 | 58 | 0.100.70 | ATCTTGAATGTGGTTGTATTGC | 2/1 asymmetric bulge | 3.8 |
| FIG. 11 | | (−5, +40) | CGCGTGGTTTCACTCCCAGGA | 6/6 symmetric loop | |
| | | | GGCCAAAGCACTCTCCAGTGA | 1 G/G mismatch | |
| | | | GAACTCGGACTGTGTCCCTCC | 1 A/C mismatch | |
| | | | CGCTGCTGGGCTGGAgtgg | 3/3 symmetric bulge | |
| | | | AATTTTTGGAG | 6/6 symmetric loop | |
| | | | CAGGTTTTCTGACTTCGGTCGG | | |
| | | | AAAACCCCT | | |
| FIG. 10 | 59 | 0.100.70 | ATCTTGAATGTGGTTGTATTGC | 2/1 asymmetric bulge | 4.5 |
| FIG. 11 | | (−5, +38) | CGGCTGGTAACACTCCCAGGA | 6/6 symmetric loop | |
| | | | GGCCAAAGCACTCTCCAGTGA | 1 G/G mismatch | |
| | | | GAACTCGGACTGTGTCCCTCC | 1 A/C mismatch | |
| | | | CGCTGCTGGGCTGGAgtgg | 3/3 symmetric bulge | |
| | | | AATTTTTGGAG | 6/6 symmetric loop | |
| | | | CAGGTTTTCTGACTTCGGTCGG | | |
| | | | AAAACCCCT | | |
| FIG. 10 | 60 | 0.100.70 | ATCTTGAATGTGGTTGTATTGC | 2/1 asymmetric bulge | 6 |
| FIG. 11 | | (−5, +36) | CGGCACGTAAGTCTCCCAGGA | 6/6 symmetric loop | |
| | | | GGCCAAAGCACTCTCCAGTGA | 1 G/G mismatch | |
| | | | GAACTCGGACTGTGTCCCTCC | 1 A/C mismatch | |
| | | | CGCTGCTGGGCTGGAgtgg | 3/3 symmetric bulge | |
| | | | AATTTTTGGAG | 6/6 symmetric loop | |
| | | | CAGGTTTTCTGACTTCGGTCGG | | |
| | | | AAAACCCCT | | |
| FIG. 10 | 61 | 0.100.70 | ATCTTGAATGTGGTTGTATTGC | 2/1 asymmetric bulge | 17.9 |
| FIG. 11 | | (−5, +34) | CGGCACCAAAGTGACCCAGGA | 6/6 symmetric loop | |
| | | | GGCCAAAGCACTCTCCAGTGA | 1 G/G mismatch | |
| | | | GAACTCGGACTGTGTCCCTCC | 1 A/C mismatch | |
| | | | CGCTGCTGGGCTGGAgtgg | 3/3 symmetric bulge | |
| | | | AATTTTTGGAG | 6/6 symmetric loop | |
| | | | CAGGTTTTCTGACTTCGGTCGG | | |
| | | | AAAACCCCT | | |
| FIG. 10 | 62 | 0.100.70 | ATCTTGAATGTGGTTGTATTGC | 2/1 asymmetric bulge | 23.7 |
| FIG. 11 | | (−5, +32) | CGGCACCATTGTGAGGCAGGA | 6/6 symmetric loop | |
| | | | GGCCAAAGCACTCTCCAGTGA | 1 G/G mismatch | |
| | | | GAACTCGGACTGTGTCCCTCC | 1 A/C mismatch | |
| | | | CGCTGCTGGGCTGGAgtgg | 3/3 symmetric bulge | |
| | | | AATTTTTGGAG | 6/6 symmetric loop | |
| | | | CAGGTTTTCTGACTTCGGTCGG | | |
| | | | AAAACCCCT | | |
| FIG. 10 | 63 | 0.100.70 | ATCTTGAATGTGGTTGTATTGC | 2/1 asymmetric bulge | 10.8 |
| FIG. 11 | | (−5, +30) | CGGCACCATTCAGAGGGTGGA | 6/6 symmetric loop | |
| | | | GGCCAAAGCACTCTCCAGTGA | 1 G/G mismatch | |
| | | | GAACTCGGACTGTGTCCCTCC | 1 A/C mismatch | |
| | | | CGCTGCTGGGCTGGAgtgg | 3/3 symmetric bulge | |
| | | | AATTTTTGGAG | 6/6 symmetric loop | |
| | | | CAGGTTTTCTGACTTCGGTCGG | | |
| | | | AAAACCCCT | | |
| FIG. 10 | 64 | 0.100.70 | ATCTTGAATGTGGTTGTATTGC | 2/1 asymmetric bulge | 9.8 |
| FIG. 11 | | (−5, +27) | CGGCACCATTCACTCGGTCCT | 6/6 symmetric loop | |
| | | | GGCCAAAGCACTCTCCAGTGA | 1 G/G mismatch | |
| | | | GAACTCGGACTGTGTCCCTCC | 1 A/C mismatch | |
| | | | CGCTGCTGGGCTGGAgtgg | 3/3 symmetric bulge | |
| | | | AATTTTTGGAG | 6/6 symmetric loop | |
| | | | CAGGTTTTCTGACTTCGGTCGG | | |
| | | | AAAACCCCT | | |
| FIG. 10 | 65 | 0.100.70 | ATCTTGAATGTGGTTGTATTGC | 2/1 asymmetric bulge | 15 |
| FIG. 11 | | (−5, +25) | CGGCACCATTCACTCCCTCCTC | 6/6 symmetric loop | |
| | | | CCCAAAGCACTCTCCAGTGAG | 1 G/G mismatch | |
| | | | AACTCGGACTGTGTCCCTCCC | 1 A/C mismatch | |
| | | | GCTGCTGGGCTGGAgtgg | 3/3 symmetric bulge | |
| | | | AATTTTTGGAG | 6/6 symmetric loop | |
| | | | CAGGTTTTCTGACTTCGGTCGG | | |
| | | | AAAACCCCT | | |
| FIG. 10 | 66 | 0.100.70 | ATCTTGAATGTGGTTGTATTGC | 2/1 asymmetric bulge | 12.3 |
| FIG. 11 | | (−5, +23) | CGGCACCATTCACTCCCAGCT | 6/6 symmetric loop | |
| | | | CCGGAAAGCACTCTCCAGTGA | 1 G/G mismatch | |
| | | | GAACTCGGACTGTGTCCCTCC | 1 A/C mismatch | |
| | | | CGCTGCTGGGCTGGAgtgg | 3/3 symmetric bulge | |
| | | | AATTTTTGGAG | 6/6 symmetric loop | |
| | | | CAGGTTTTCTGACTTCGGTCGG | | |
| | | | AAAACCCCT | | |
| FIG. 10 | 67 | 0.100.70 | ATCTTGAATGTGGTTGTATTGC | 2/1 asymmetric bulge | 17 |
| FIG. 11 | | (−5, +20) | CGGCACCATTCACTCCCAGGA | 6/6 symmetric loop | |
| | | | GCGGTTTGCACTCTCCAGTGA | 1 G/G mismatch | |
| | | | GAACTCGGACTGTGTCCCTCC | 1 A/C mismatch | |
| | | | CGCTGCTGGGCTGGAgtgg | 3/3 symmetric bulge | |
| | | | AATTTTTGGAG | 6/6 symmetric loop | |
| | | | CAGGTTTTCTGACTTCGGTCGG | | |
| | | | AAAACCCCT | | |
| FIG. 10 | 68 | 0.100.70 | ATCTTGAATGTGGTTGTATTGC | 2/1 asymmetric bulge | 13.3 |
| FIG. 11 | | (−5, +18) | CGGCACCATTCACTCCCAGGA | 6/6 symmetric loop | |
| | | | GGCGTTTCGACTCTCCAGTGA | 1 G/G mismatch | |
| | | | GAACTCGGACTGTGTCCCTCC | 1 A/C mismatch | |
| | | | CGCTGCTGGGCTGGAgtgg | 3/3 symmetric bulge | |
| | | | AATTTTTGGAG | 6/6 symmetric loop | |
| | | | CAGGTTTTCTGACTTCGGTCGG | | |
| | | | AAAACCCCT | | |
| FIG. 10 | 69 | 0.100.70 | ATCTTGAATGTGGTTGTATTGC | 2/1 asymmetric bulge | 2.5 |
| FIG. 11 | | (−5, +16) | CGGCACCATTCACTCCCAGGA | 6/6 symmetric loop | |
| | | | GGCCATTCGTGTCTCCAGTGA | 1 G/G mismatch | |
| | | | GAACTCGGACTGTGTCCCTCC | 1 A/C mismatch | |
| | | | CGCTGCTGGGCTGGAgtgg | 3/3 symmetric bulge | |
| | | | AATTTTTGGAG | 6/6 symmetric loop | |
| | | | CAGGTTTTCTGACTTCGGTCGG | | |
| | | | AAAACCCCT | | |
| FIG. 10 | 70 | 0.100.70 | ATCTTGAATGTGGTTGTATTGC | 2/1 asymmetric bulge | 1 |
| FIG. 11 | | (−5, +14) | CGGCACCATTCACTCCCAGGA | 6/6 symmetric loop | |
| | | | GGCCAAACGTGAGTCCAGTGA | 1 G/G mismatch | |
| | | | GAACTCGGACTGTGTCCCTCC | 1 A/C mismatch | |
| | | | CGCTGCTGGGCTGGAgtgg | 3/3 symmetric bulge | |
| | | | AATTTTTGGAG | 6/6 symmetric loop | |
| | | | CAGGTTTTCTGACTTCGGTCGG | | |
| | | | AAAACCCCT | | |
| FIG. 10 | 71 | 0.100.70 | ATCTTGAATGTGGTTGTATTGC | 2/1 asymmetric bulge | 1 |
| FIG. 11 | | (−5, +12) | CGGCACCATTCACTCCCAGGA | 6/6 symmetric loop | |
| | | | GGCCAAAGCTGAGAGCAGTGA | 1 G/G mismatch | |
| | | | GAACTCGGACTGTGTCCCTCC | 1 A/C mismatch | |
| | | | CGCTGCTGGGCTGGAgtgg | 3/3 symmetric bulge | |
| | | | AATTTTTGGAG | 6/6 symmetric loop | |
| | | | CAGGTTTTCTGACTTCGGTCGG | | |
| | | | AAAACCCCT | | |
| FIG. 10 | 72 | 0.100.70 | ATCTTGAATGTGGTTGTATTGC | 2/1 asymmetric bulge | 16.5 |
| FIG. 11 | | | CGGCACCATTCACTCCCAGGA | 1/0 asymmetric bulge | |
| FIG. 12 | | | GGCCAAAGCACTCTCCAGTGA | 1 G/G mismatch | |
| FIG. 13 | | | GAACTCGGACCACAGCCTCCC | 1 A/C mismatch | |
| FIG. 14 | | | GCTGCTGGGCTGGAG gtgg | 3/3 symmetric bulge | |
| | | | AATTTTTGGAG | | |
| | | | CAGGTTTTCTGACTTCGGTCGG | | |
| | | | AAAACCCCT | | |
| FIG. 12 | 73 | 0.100.70 | ATCTTGAATGTGGTTGTTTTGC | 6/6 symmetric loop | 48.8 |
| FIG. 13 | | (−15, +33) | CGGCACCATAGTGAGCCAGGA | 1 G/G mismatch | |
| FIG. 14 | | | GGCCAAAGCACTCTCCAGTGA | 1 A/C mismatch | |
| FIG. 18 | | | GAACTCGGACACACAGCCTGA | 3/3 symmetric bulge | |
| | | | GTGAGCTGGGCTGGA gtgg | 6/6 symmetric loop | |
| | | | AATTTTTGGAG | | |
| | | | CAGGTTTTCTGACTTCGGTCGG | | |
| | | | AAAACCCCT | | |
| FIG. 12 | 74 | 0.100.70 | ATCTTGAATGTGGTTGTTTTGC | 6/6 symmetric loop | 45.2 |
| FIG. 13 | | (−14, +33) | CGGCACCATAGTGAGCCAGGA | 1 G/G mismatch | |
| FIG. 14 | | | GGCCAAAGCACTCTCCAGTGA | 1 A/C mismatch | |
| | | | GAACTCGGACACACAGCCTCA | 3/3 symmetric bulge | |
| | | | GTGTGCTGGGCTGGA gtgg | 6/6 symmetric loop | |
| | | | AATTTTTGGAG | | |
| | | | CAGGTTTTCTGACTTCGGTCGG | | |
| | | | AAAACCCCT | | |
| FIG. 12 | 75 | 0.100.70 | ATCTTGAATGTGGTTGTTTTGC | 5/5 symmetric loop | 43 |
| FIG. 13 | | (−13, +33) | CGGCACCATAGTGAGCCAGGA | 1 G/G mismatch | |
| FIG. 14 | | | GGCCAAAGCACTCTCCAGTGA | 1 A/C mismatch | |
| | | | GAACTCGGACACACAGCCACA | 3/3 symmetric bulge | |
| | | | GACTGCTGGGCTGGA gtgg | 6/6 symmetric loop | |
| | | | AATTTTTGGAG | | |
| | | | CAGGTTTTCTGACTTCGGTCGG | | |
| | | | AAAACCCCT | | |
| FIG. 12 | 76 | 0.100.70 | ATCTTGAATGTGGTTGTTTTGC | 6/6 symmetric loop | 42.8 |
| FIG. 13 | | (−12, +33) | CGGCACCATAGTGAGCCAGGA | 1 G/G mismatch | |
| | | | GGCCAAAGCACTCTCCAGTGA | 1 A/C mismatch | |
| | | | GAACTCGGACACACAGCGACA | 3/3 symmetric bulge | |
| | | | GGCTGCTGGGCTGGA gtgg | 6/6 symmetric loop | |
| | | | AATTTTTGGAG | | |
| | | | CAGGTTTTCTGACTTCGGTCGG | | |
| | | | AAAACCCCT | | |
| FIG. 12 | 77 | 0.100.70 | ATCTTGAATGTGGTTGTTTTGC | 6/6 symmetric loop | 37 |
| FIG. 13 | | (−11, +33) | CGGCACCATAGTGAGCCAGGA | 1 G/G mismatch | |
| | | | GGCCAAAGCACTCTCCAGTGA | 1 A/C mismatch | |
| | | | GAACTCGGACACACAGGGACA | 3/3 symmetric bulge | |
| | | | CGCTGCTGGGCTGGA gtgg | 6/6 symmetric loop | |
| | | | AATTTTTGGAG | | |
| | | | CAGGTTTTCTGACTTCGGTCGG | | |
| | | | AAAACCCCT | | |
| FIG. 12 | 78 | 0.100.70 | ATCTTGAATGTGGTTGTTTTGC | 1/0 asymmetric bulge | 44.4 |
| FIG. 13 | | (−9, +33) | CGGCACCATAGTGAGCCAGGA | 5/5 symmetric loop | |
| FIG. 14 | | | GGCCAAAGCACTCTCCAGTGA | 1 G/G mismatch | |
| | | | GAACTCGGACACACTCGGAGT | 1 A/C mismatch | |
| | | | CGCTGCTGGGCTGGA gtgg | 3/3 symmetric bulge | |
| | | | AATTTTTGGAG | 6/6 symmetric loop | |
| | | | CAGGTTTTCTGACTTCGGTCGG | | |
| | | | AAAACCCCT | | |
| FIG. 12 | 79 | 0.100.70 | ATCTTGAATGTGGTTGTTTTGC | 1/0 asymmetric bulge | 34 |
| FIG. 13 | | (−6, +33) | CGGCACCATAGTGAGCCAGGA | 5/5 symmetric loop | |
| | | | GGCCAAAGCACTCTCCAGTGA | 1 G/G mismatch | |
| | | | GAACTCGGACAGTGTCCCTGT | 1 A/C mismatch | |
| | | | CGCTGCTGGGCTGGA gtgg | 3/3 symmetric bulge | |
| | | | AATTTTTGGAG | 6/6 symmetric loop | |
| | | | CAGGTTTTCTGACTTCGGTCGG | | |
| | | | AAAACCCCT | | |
| FIG. 12 | 80 | 0.100.70 | ATCTTGAATGTGGTTGTTTTGC | 1/0 asymmetric bulge | 33.7 |
| FIG. 13 | | (−5, +33) | CGGCACCATAGTGAGCCAGGA | 6/6 symmetric loop | |
| | | Version 2 | GGCCAAAGCACTCTCCAGTGA | 1 G/G mismatch | |
| | | | GAACTCGGACTGTGTCCCTGT | 1 A/C mismatch | |
| | | | CGCTGCTGGGCTGGA gtgg | 3/3 symmetric bulge | |
| | | | AATTTTTGGAG | 6/6 symmetric loop | |
| | | | CAGGTTTTCTGACTTCGGTCGG | | |
| | | | AAAACCCCT | | |
| FIG. 12 | 81 | 0.100.70 | ATCTTGAATGTGGTTGTATTGC | 2/1 asymmetric bulge | 24.4 |
| FIG. 13 | | (−5, +32) | CGGCACCATTGTGAGGCAGGA | 6/6 symmetric loop | |
| | | | GGCCAAAGCACTCTCCAGTGA | 1 G/G mismatch | |
| | | | GAACTCGGACTGTGTCCCTCC | 1 A/C mismatch | |
| | | | CGCTGCTGGGCTGGA gtgg | 3/3 symmetric bulge | |
| | | | AATTTTTGGAG | 6/6 symmetric loop | |
| | | | CAGGTTTTCTGACTTCGGTCGG | | |
| | | | AAAACCCCT | | |
| FIG. 15 | 82 | 0.78.48 | CGGCACCATAGTGAGCCAGGA | 1/0 asymmetric bulge | 6.6 |
| FIG. 16 | | (−9, +33) | GGCCAAAGCACTCTCCAGTGA | 5/5 symmetric loop | |
| | | | GAACTCGGACACACTCGGAGT | 1 G/G mismatch | |
| | | | CGCTGCTGGGCTGGA gtgg | 1 A/C mismatch | |
| | | | AATTTTTGGAG | 3/3 symmetric bulge | |
| | | | CAGGTTTTCTGACTTCGGTCGG | 6/6 symmetric loop | |
| | | | AAAACCCCT | | |
| FIG. 15 | 83 | 0.80.50 | GCCGGCACCATAGTGAGCCAG | 1/0 asymmetric bulge | 9.1 |
| FIG. 16 | | (−9, +33) | GAGGCCAAAGCACTCTCCAGT | 5/5 symmetric loop | |
| | | | GAGAACTCGGACACACTCGGA | 1 G/G mismatch | |
| | | | GTCGCTGCTGGGCTGGA gtgg | 1 A/C mismatch | |
| | | | AATTTTTGGAG | 3/3 symmetric bulge | |
| | | | CAGGTTTTCTGACTTCGGTCGG | 6/6 symmetric loop | |
| | | | AAAACCCCT | | |
| FIG. 15 | 84 | 0.82.52 | TTGCCGGCACCATAGTGAGCC | 1/0 asymmetric bulge | 16.8 |
| FIG. 16 | | (−9, +33) | AGGAGGCCAAAGCACTCTCCA | 5/5 symmetric loop | |
| | | | GTGAGAACTCGGACACACTCG | 1 G/G mismatch | |
| | | | GAGTCGCTGCTGGGCTGGA | 1 A/C mismatch | |
| | | | gtgg AATTTTTGGAG | 3/3 symmetric bulge | |
| | | | CAGGTTTTCTGACTTCGGTCGG | 6/6 symmetric loop | |
| | | | AAAACCCCT | | |
| FIG. 15 | 85 | 0.84.54 | TTTTGCCGGCACCATAGTGAG | 1/0 asymmetric bulge | 37.2 |
| FIG. 16 | | (−9, +33) | CCAGGAGGCCAAAGCACTCTC | 5/5 symmetric loop | |
| | | | CAGTGAGAACTCGGACACACT | 1 G/G mismatch | |
| | | | CGGAGTCGCTGCTGGGCTGGA | 1 A/C mismatch | |
| | | | gtgg AATTTTTGGAG | 3/3 symmetric bulge | |
| | | | CAGGTTTTCTGACTTCGGTCGG | 6/6 symmetric loop | |
| | | | AAAACCCCT | | |
| FIG. 15 | 86 | 0.86.56 | TGTTTTGCCGGCACCATAGTG | 1/0 asymmetric bulge | 37.5 |
| FIG. 16 | | (−9, +33) | AGCCAGGAGGCCAAAGCACTC | 5/5 symmetric loop | |
| | | | TCCAGTGAGAACTCGGACACA | 1 G/G mismatch | |
| | | | CTCGGAGTCGCTGCTGGGCTG | 1 A/C mismatch | |
| | | | GA gtgg AATTTTTGGAG | 3/3 symmetric bulge | |
| | | | CAGGTTTTCTGACTTCGGTCGG | 6/6 symmetric loop | |
| | | | AAAACCCCT | | |
| FIG. 15 | 87 | 0.88.58 | GTTGTTTTGCCGGCACCATAGT | 1/0 asymmetric bulge | 37.9 |
| FIG. 16 | | (−9, +33) | GAGCCAGGAGGCCAAAGCACT | 5/5 symmetric loop | |
| | | | CTCCAGTGAGAACTCGGACAC | 1 G/G mismatch | |
| | | | ACTCGGAGTCGCTGCTGGGCT | 1 A/C mismatch | |
| | | | GGA gtgg AATTTTTGGAG | 3/3 symmetric bulge | |
| | | | CAGGTTTTCTGACTTCGGTCGG | 6/6 symmetric loop | |
| | | | AAAACCCCT | | |
| FIG. 15 | 88 | 0.90.60 | TGGTTGTTTTGCCGGCACCATA | 1/0 asymmetric bulge | 37.3 |
| FIG. 16 | | (−9, +33) | GTGAGCCAGGAGGCCAAAGC | 5/5 symmetric loop | |
| | | | ACTCTCCAGTGAGAACTCGGA | 1 G/G mismatch | |
| | | | CACACTCGGAGTCGCTGCTGG | 1 A/C mismatch | |
| | | | GCTGGA gtgg AATTTTTGGAG | 3/3 symmetric bulge | |
| | | | CAGGTTTTCTGACTTCGGTCGG | 6/6 symmetric loop | |
| | | | AAAACCCCT | | |
| FIG. 15 | 89 | 0.92.62 | TGTGGTTGTTTTGCCGGCACCA | 1/0 asymmetric bulge | 46.6 |
| FIG. 16 | | (−9, +33) | TAGTGAGCCAGGAGGCCAAAG | 5/5 symmetric loop | |
| FIG. 17 | | | CACTCTCCAGTGAGAACTCGG | 1 G/G mismatch | |
| | | | ACACACTCGGAGTCGCTGCTG | 1 A/C mismatch | |
| | | | GGCTGGA gtgg AATTTTTGGAG | 3/3 symmetric bulge | |
| | | | CAGGTTTTCTGACTTCGGTCGG | 6/6 symmetric loop | |
| | | | AAAACCCCT | | |
| FIG. 15 | 90 | 0.94.64 | AATGTGGTTGTTTTGCCGGCA | 1/0 asymmetric bulge | 47.4 |
| FIG. 16 | | (−9, +33) | CCATAGTGAGCCAGGAGGCCA | 5/5 symmetric loop | |
| FIG. 17 | | | AAGCACTCTCCAGTGAGAACT | 1 G/G mismatch | |
| | | | CGGACACACTCGGAGTCGCTG | 1 A/C mismatch | |
| | | | CTGGGCTGGA gtgg | 3/3 symmetric bulge | |
| | | | AATTTTTGGAG | 6/6 symmetric loop | |
| | | | CAGGTTTTCTGACTTCGGTCGG | | |
| | | | AAAACCCCT | | |
| FIG. 15 | 91 | 0.96.66 | TGAATGTGGTTGTTTTGCCGGC | 1/0 asymmetric bulge | 46.1 |
| FIG. 16 | | (−9, +33) | ACCATAGTGAGCCAGGAGGCC | 5/5 symmetric loop | |
| FIG. 17 | | | AAAGCACTCTCCAGTGAGAAC | 1 G/G mismatch | |
| | | | TCGGACACACTCGGAGTCGCT | 1 A/C mismatch | |
| | | | GCTGGGCTGGA gtgg | 3/3 symmetric bulge | |
| | | | AATTTTTGGAG | 6/6 symmetric loop | |
| | | | CAGGTTTTCTGACTTCGGTCGG | | |
| | | | AAAACCCCT | | |
| FIG. 15 | 92 | 0.98.68 | CTTGAATGTGGTTGTTTTGCCG | 1/0 asymmetric bulge | 40.7 |
| FIG. 16 | | (−9, +33) | GCACCATAGTGAGCCAGGAGG | 5/5 symmetric loop | |
| | | | CCAAAGCACTCTCCAGTGAGA | 1 G/G mismatch | |
| | | | ACTCGGACACACTCGGAGTCG | 1 A/C mismatch | |
| | | | CTGCTGGGCTGGA gtgg | 3/3 symmetric bulge | |
| | | | AATTTTTGGAG | 6/6 symmetric loop | |
| | | | CAGGTTTTCTGACTTCGGTCGG | | |
| | | | AAAACCCCT | | |
| FIG. 15 | 93 | 0.100.70 | ATCTTGAATGTGGTTGTTTTGC | 1/0 asymmetric bulge | 41.2 |
| FIG. 16 | | (−9, +33) | CGGCACCATAGTGAGCCAGGA | 5/5 symmetric loop | |
| | | | GGCCAAAGCACTCTCCAGTGA | 1 G/G mismatch | |
| | | | GAACTCGGACACACTCGGAGT | 1 A/C mismatch | |
| | | | CGCTGCTGGGCTGGA gtgg | 3/3 symmetric bulge | |
| | | | AATTTTTGGAG | 6/6 symmetric loop | |
| | | | CAGGTTTTCTGACTTCGGTCGG | | |
| | | | AAAACCCCT | | |
| FIG. 18 | 94 | 0.78.48 | CGGCACCATAGTGAGCCAGGA | 6/6 symmetric loop | 7.1 |
| | | (−15, +33) | GGCCAAAGCACTCTCCAGTGA | 1 G/G mismatch | |
| | | | GAACTCGGACACACAGCCTGA | 1 A/C mismatch | |
| | | | GTGAGCTGGGCTGGA gtgg | 3/3 symmetric bulge | |
| | | | AATTTTTGGAG | 6/6 symmetric loop | |
| | | | CAGGTTTTCTGACTTCGGTCGG | | |
| | | | AAAACCCCT | | |
| FIG. 18 | 95 | 0.80.50 | GCCGGCACCATAGTGAGCCAG | 6/6 symmetric loop | 12.4 |
| | | (−15, +33) | GAGGCCAAAGCACTCTCCAGT | 1 G/G mismatch | |
| | | | GAGAACTCGGACACACAGCCT | 1 A/C mismatch | |
| | | | GAGTGAGCTGGGCTGGA gtgg | 3/3 symmetric bulge | |
| | | | AATTTTTGGAG | 6/6 symmetric loop | |
| | | | CAGGTTTTCTGACTTCGGTCGG | | |
| | | | AAAACCCCT | | |
| FIG. 18 | 96 | 0.82.52 | TTGCCGGCACCATAGTGAGCC | 6/6 symmetric loop | 19.8 |
| | | (−15, +33) | AGGAGGCCAAAGCACTCTCCA | 1 G/G mismatch | |
| | | | GTGAGAACTCGGACACACAGC | 1 A/C mismatch | |
| | | | CTGAGTGAGCTGGGCTGGA | 3/3 symmetric bulge | |
| | | | gtgg AATTTTTGGAG | 6/6 symmetric loop | |
| | | | CAGGTTTTCTGACTTCGGTCGG | | |
| | | | AAAACCCCT | | |
| FIG. 18 | 97 | 0.84.54 | TTTTGCCGGCACCATAGTGAG | 6/6 symmetric loop | 38.2 |
| | | (−15, +33) | CCAGGAGGCCAAAGCACTCTC | 1 G/G mismatch | |
| | | | CAGTGAGAACTCGGACACACA | 1 A/C mismatch | |
| | | | GCCTGAGTGAGCTGGGCTGGA | 3/3 symmetric bulge | |
| | | | gtgg AATTTTTGGAG | 6/6 symmetric loop | |
| | | | CAGGTTTTCTGACTTCGGTCGG | | |
| | | | AAAACCCCT | | |
| FIG. 18 | 98 | 0.86.56 | TGTTTTGCCGGCACCATAGTG | 6/6 symmetric loop | 41.9 |
| | | (−15, +33) | AGCCAGGAGGCCAAAGCACTC | 1 G/G mismatch | |
| | | | TCCAGTGAGAACTCGGACACA | 1 A/C mismatch | |
| | | | CAGCCTGAGTGAGCTGGGCTG | 3/3 symmetric bulge | |
| | | | GA gtgg AATTTTTGGAG | 6/6 symmetric loop | |
| | | | CAGGTTTTCTGACTTCGGTCGG | | |
| | | | AAAACCCCT | | |
| FIG. 18 | 99 | 0.88.58 | GTTGTTTTGCCGGCACCATAGT | 6/6 symmetric loop | 37.8 |
| | | (−15, +33) | GAGCCAGGAGGCCAAAGCACT | 1 G/G mismatch | |
| | | | CTCCAGTGAGAACTCGGACAC | 1 A/C mismatch | |
| | | | ACAGCCTGAGTGAGCTGGGCT | 3/3 symmetric bulge | |
| | | | GGA gtgg AATTTTTGGAG | 6/6 symmetric loop | |
| | | | CAGGTTTTCTGACTTCGGTCGG | | |
| | | | AAAACCCCT | | |
| FIG. 18 | 100 | 0.90.60 | TGGTTGTTTTGCCGGCACCATA | 6/6 symmetric loop | 50.7 |
| FIG. 19 | | (−15, +33) | GTGAGCCAGGAGGCCAAAGC | 1 G/G mismatch | |
| | | | ACTCTCCAGTGAGAACTCGGA | 1 A/C mismatch | |
| | | | CACACAGCCTGAGTGAGCTGG | 3/3 symmetric bulge | |
| | | | GCTGGA gtgg AATTTTTGGAG | 6/6 symmetric loop | |
| | | | CAGGTTTTCTGACTTCGGTCGG | | |
| | | | AAAACCCCT | | |
| FIG. 18 | 101 | 0.92.62 | TGTGGTTGTTTTGCCGGCACCA | 6/6 symmetric loop | 53 |
| FIG. 19 | | (−15, +33) | TAGTGAGCCAGGAGGCCAAAG | 1 G/G mismatch | |
| FIG. 20 | | | CACTCTCCAGTGAGAACTCGG | 1 A/C mismatch | |
| | | | ACACACAGCCTGAGTGAGCTG | 3/3 symmetric bulge | |
| | | | GGCTGGA gtgg AATTTTTGGAG | 6/6 symmetric loop | |
| | | | CAGGTTTTCTGACTTCGGTCGG | | |
| | | | AAAACCCCT | | |
| FIG. 18 | 102 | 0.94.64 | AATGTGGTTGTTTTGCCGGCA | 6/6 symmetric loop | 53.1 |
| FIG. 19 | | (−15, +33) | CCATAGTGAGCCAGGAGGCCA | 1 G/G mismatch | |
| | | | AAGCACTCTCCAGTGAGAACT | 1 A/C mismatch | |
| | | | CGGACACACAGCCTGAGTGAG | 3/3 symmetric bulge | |
| | | | CTGGGCTGGA gtgg | 6/6 symmetric loop | |
| | | | AATTTTTGGAG | | |
| | | | CAGGTTTTCTGACTTCGGTCGG | | |
| | | | AAAACCCCT | | |
| FIG. 18 | 103 | 0.96.66 | TGAATGTGGTTGTTTTGCCGGC | 6/6 symmetric loop | 49.4 |
| | | (−15, +33) | ACCATAGTGAGCCAGGAGGCC | 1 G/G mismatch | |
| | | | AAAGCACTCTCCAGTGAGAAC | 1 A/C mismatch | |
| | | | TCGGACACACAGCCTGAGTGA | 3/3 symmetric bulge | |
| | | | GCTGGGCTGGA gtgg | 6/6 symmetric loop | |
| | | | AATTTTTGGAG | | |
| | | | CAGGTTTTCTGACTTCGGTCGG | | |
| | | | AAAACCCCT | | |
| FIG. 18 | 104 | 0.98.68 | CTTGAATGTGGTTGTTTTGCCG | 6/6 symmetric loop | 41.4 |
| | | (−15, +33) | GCACCATAGTGAGCCAGGAGG | 1 G/G mismatch | |
| | | | CCAAAGCACTCTCCAGTGAGA | 1 A/C mismatch | |
| | | | ACTCGGACACACAGCCTGAGT | 3/3 symmetric bulge | |
| | | | GAGCTGGGCTGGA gtgg | | |
| | | | AATTTTTGGAG | | |
| | | | CAGGTTTTCTGACTTCGGTCGG | 6/6 symmetric loop | |
| | | | AAAACCCCT | | |
| FIG. 21 | 105 | ABCA4 | This is the same sequence of the the | | |
| | | Macro- | guide 0.100.70 (−9, +33) inserted | | |
| | | footprint | above | | |
| FIG. 21 | 106 | GAPDH | CCACAGTTTCCCGGAGGGGCC | 1 A/C mismatch | 4.5 |
| FIG. 22 | | 100.70 A- | ATCCACAGTCTTCTGGGTGGC | | |
| | | C | AGTGATGGCATGGACTGTGGT | | |
| | | | CATGAGCCCTTCCACGATACC | | |
| | | | AAAGTTGTCATGGATG gtgg | | |
| | | | AATTTTTGGAG | | |
| | | | CAGGTTTTCTGACTTCGGTCGG | | |
| | | | AAAACCCCT | | |
| FIG. 21 | 107 | GAPDH | CCACAGTTTCCCGGAGGGGCC | 2/2 symmetric bulge | 6.3 |
| FIG. 22 | | Shaker | ATCCACAGTCTTCTGGGTGGC | 1 G/G mismatch | |
| | | mimicry | AGTGATGGCATGGACTGTGCA | 1 A/C mismatch | |
| | | | GATGAGCGCTTCCACGATAGG | 3/3 symmetric bulge | |
| | | | AAAGTTGTCATGGATG gtgg | | |
| | | | AATTTTTGGAG | | |
| | | | CAGGTTTTCTGACTTCGGTCGG | | |
| | | | AAAACCCCT | | |
| FIG. 21 | 108 | GAPDH | CCACAGTTTCCCGGAGGGGCC | 6/6 symmetric loop | 27 |
| FIG. 22 | | Shaker | ATCCACAGTCAAGACCGTGGC | 1 G/G mismatch | |
| | | mimicry | AGTGATGGCATGGACTGTGCA | 1 A/C mismatch | |
| | | −9, +33 | GATGAGCGCTTCCACCTATGG | 3/3 symmetric bulge | |
| | | | AAAGTTGTCATGGATG gtgg | 6/6 symmetric loop | |
| | | | AATTTTTGGAG | | |
| | | | CAGGTTTTCTGACTTCGGTCGG | | |
| | | | AAAACCCCT | | |
| FIG. 24 | 109 | Rab7a | TTCCCCCTGGAGAGATGAAAA | 1 A/C mismatch | 6.5 |
| FIG. 25 | | GAC | GCTTTTTGGCTCTTAAGTCTTT | | |
| FIG. 26 | | 100.70 A- | GATAAAAGGCGTACATAATTC | | |
| | | C | TTGTGCCTACTGTACAGAATA | | |
| | | | CTGCCGCTAGCTGGA gtgg | | |
| | | | AATTTTTGGAG | | |
| | | | CAGGTTTTCTGACTTCGGTCGG | | |
| | | | AAAACCCCT | | |
| FIG. 24 | 110 | Rab7a | TTCCCCCTGGAGAGATGAAAA | 2/2 symmetric bulge | 12 |
| FIG. 25 | | GAC | GCTTTTTGGCTCTTAAGTCTTT | 1 G/G mismatch | |
| FIG. 26 | | 100.70 | GATAAAAGGCGTACATAAAAG | 1 A/C mismatch | |
| | | Shaker | TTGTGCGTACTGTACAGACCA | 3/3 symmetric bulge | |
| | | mimicry | CTGCCGCTAGCTGGA gtgg | | |
| | | | AATTTTTGGAG | | |
| | | | CAGGTTTTCTGACTTCGGTCGG | | |
| | | | AAAACCCCT | | |
| FIG. 24 | 111 | Rab7a | TTCCCCCTGGAGAGATGAAAA | 6/6 symmetric loop | 28.5 |
| FIG. 25 | | GAC | GCTTTTTGGCAGCCTTGTCTTT | 1 G/G mismatch | |
| FIG. 26 | | 100.70 | GATAAAAGGCGTACATAAAAG | 1 A/C mismatch | |
| | | Shaker | TTGTGCGTACTGTAGTCTCCAC | 3/3 symmetric bulge | |
| | | mimicry | TGCCGCTAGCTGGA gtgg | 6/6 symmetric loop | |
| | | −9, +33 | AATTTTTGGAG | | |
| | | | CAGGTTTTCTGACTTCGGTCGG | | |
| | | | AAAACCCCT | | |
| FIG. 27 | 112 | APP GAA | CTGCAAAGAACACCAATTTTT | 1 A/C mismatch | 1.25 |
| FIG. 28 | | 100.70 A- | GATGATGAACTTCATATCCTG | | |
| FIG. 29 | | C | AGTCATGTCGGAATTCTGCAT | | |
| | | | CCATCTCCACTTCAGAGATCTC | | |
| | | | CTCCGTCTTGATATT gtgg | | |
| | | | AATTTTTGGAG | | |
| | | | CAGGTTTTCTGACTTCGGTCGG | | |
| | | | AAAACCCCT | | |
| FIG. 27 | 113 | APP GAA | CTGCAAAGAACACCAATTTTT | 2/2 symmetric bulge | 1.25 |
| FIG. 28 | | 100.70 | GATGATGAACTTCATATCCTG | 1 G/G mismatch | |
| FIG. 29 | | Shaker | AGTCATGTCGGAATTCTGCCA | 1 A/C mismatch | |
| | | mimicry | GCATCTCGACTTCAGAGATGA | 3/3 symmetric bulge | |
| | | | CCTCCGTCTTGATATT gtgg | | |
| | | | AATTTTTGGAG | | |
| | | | CAGGTTTTCTGACTTCGGTCGG | | |
| | | | AAAACCCCT | | |
| FIG. 27 | 114 | APP GAA | CTGCAAAGAACACCAATTTTT | 6/6 symmetric loop | 13.8 |
| FIG. 28 | | 100.70 | GATGATGAACAAGTTTTCCTG | 1 G/G mismatch | |
| FIG. 29 | | Shaker | AGTCATGTCGGAATTCTGCCA | 1 A/C mismatch | |
| | | mimicry | GCATCTCGACTTCAGTCTAGA | 3/3 symmetric bulge | |
| | | −9, +33 | CCTCCGTCTTGATATT gtgg | 6/6 symmetric loop | |
| | | | AATTTTTGGAG | | |
| | | | CAGGTTTTCTGACTTCGGTCGG | | |
| | | | AAAACCCCT | | |
| FIG. 30 | 115 | MAPT | TCCTGTCCCCCAACCCGTACGT | 1 A/C mismatch | 6.3 |
| FIG. 31 | | 100.70 A- | CCCAGCGTGATCTTCCATCACT | | |
| FIG. 32 | | C | TCGAACTCCTGGCGGGGCTCA | | |
| | | | GCCACCCTGGTTCAAAGTTCA | | |
| | | | CCTGATAGTCGACA gtgg | | |
| | | | AATTTTTGGAG | | |
| | | | CAGGTTTTCTGACTTCGGTCGG | | |
| | | | AAAACCCCT | | |
| FIG. 30 | 116 | MAPT | TCCTGTCCCCCAACCCGTACGT | 2/2 symmetric bulge | 5.3 |
| FIG. 31 | | 100.70 | CCCAGCGTGATCTTCCATCACT | 1 G/G mismatch | |
| FIG. 32 | | Shaker | TCGAACTCCTGGCGGGGGAGA | 1 A/C mismatch | |
| | | mimicry | GCCACGCTGGTTCAAAGAACA | 3/3 symmetric bulge | |
| | | | CCTGATAGTCGACA gtgg | | |
| | | | AATTTTTGGAG | | |
| | | | CAGGTTTTCTGACTTCGGTCGG | | |
| | | | AAAACCCCT | | |
| FIG. 30 | 117 | MAPT | TCCTGTCCCCCAACCCGTACGT | 6/6 symmetric loop | 43.5 |
| FIG. 31 | | 100.70 | CCCAGCGTGTAGAAGCATCAC | 1 G/G mismatch | |
| FIG. 32 | | Shaker | TTCGAACTCCTGGCGGGGGAG | 1 A/C mismatch | |
| | | mimicry | AGCCACGCTGGTTCTTTCAAC | 3/3 symmetric bulge | |
| | | −9, +33 | ACCTGATAGTCGACA gtgg | 6/6 symmetric loop | |
| | | | AATTTTTGGAG | | |
| | | | CAGGTTTTCTGACTTCGGTCGG | | |
| | | | AAAACCCCT | | |

[0508] While preferred embodiments have been shown and described herein, such embodiments are provided by way of example only. Numerous variations, changes, and substitutions are contemplated without departing from the present disclosure. It should be understood that various alternatives to the embodiments described herein can be employed.

[0509] All documents cited or referenced herein and all documents cited or referenced in the herein cited documents, together with any manufacturer's instructions, descriptions, product specifications, and product sheets for any products mentioned herein or in any document incorporated by reference herein, are hereby incorporated by reference, and may be employed in the practice of the disclosure.

LENGTHY TABLES
The patent application contains a lengthy table section. A copy of the table is available in electronic form from the USPTO web site (https://seqdata.uspto.gov/?pageRequest=docDetail&DocID=US20250009904A1). An electronic copy of the table will also be available from the USPTO upon request and payment of the fee set forth in 37 CFR 1.19(b)(3).

The application's sequence listing, which the Patent Office published only in electronic form, follows.

SEQUENCE LISTING (3162 sequences)

SEQ ID NO: 1 - RNA, 45 nt, unidentified
  source 1..45: mol_type = unassigned RNA
gtggaatagtataacaatatgctaaatgttgttatagtatcccac

SEQ ID NO: 2 - DNA, 86 bp, synthetic construct
  source 1..86: mol_type = other DNA
agcactctccagtgagaactcggaccacagcctcccgctggtggaatttttggagcaggttttctgacttcggtcggaaaacccct

SEQ ID NO: 3 - DNA, 91 bp, synthetic construct
  source 1..91: mol_type = other DNA
gccaaagcactctccagtgagaactcggaccacagcctcccgctggtggaatttttggagcaggttttctgacttcggtcggaaaacccct

SEQ ID NO: 4 - DNA, 96 bp, synthetic construct
  source 1..96: mol_type = other DNA
aggaggccaaagcactctccagtgagaactcggaccacagcctcccgctggtggaatttttggagcaggttttctgacttcggtcggaaaacccct

SEQ ID NO: 5 - DNA, 101 bp, synthetic construct
  source 1..101: mol_type = other DNA
ctcccaggaggccaaagcactctccagtgagaactcggaccacagcctcccgctggtggaatttttggagcaggttttctgacttcggtcggaaaacccct

SEQ ID NO: 6 - DNA, 106 bp, synthetic construct
  source 1..106: mol_type = other DNA
attcactcccaggaggccaaagcactctccagtgagaactcggaccacagcctcccgctggtggaatttttggagcaggttttctgacttcggtcggaaaacccct

SEQ ID NO: 7 - DNA, 111 bp, synthetic construct
  source 1..111: mol_type = other DNA
gcaccattcactcccaggaggccaaagcactctccagtgagaactcggaccacagcctcccgctggtggaatttttggagcaggttttctgacttcggtcggaaaacccct

SEQ ID NO: 8 - DNA, 116 bp, synthetic construct
  source 1..116: mol_type = other DNA
tgccggcaccattcactcccaggaggccaaagcactctccagtgagaactcggaccacagcctcccgctggtggaatttttggagcaggttttctgacttcggtcggaaaacccct

SEQ ID NO: 9 - DNA, 121 bp, synthetic construct
  source 1..121: mol_type = other DNA
tgtattgccggcaccattcactcccaggaggccaaagcactctccagtgagaactcggaccacagcctcccgctggtggaatttttggagcaggttttctgacttcggtcggaaaacccct

SEQ ID NO: 10 - DNA, 126 bp, synthetic construct
  source 1..126: mol_type = other DNA
gtggttgtattgccggcaccattcactcccaggaggccaaagcactctccagtgagaactcggaccacagcctcccgctggtggaatttttggagcaggttttctgacttcggtcggaaaacccct

SEQ ID NO: 11 - DNA, 131 bp, synthetic construct
  source 1..131: mol_type = other DNA
tgaatgtggttgtattgccggcaccattcactcccaggaggccaaagcactctccagtgagaactcggaccacagcctcccgctggtggaatttttggagcaggttttctgacttcggtcggaaaacccct

SEQ ID NO: 12 - DNA, 136 bp, synthetic construct
  source 1..136: mol_type = other DNA
catcttgaatgtggttgtattgccggcaccattcactcccaggaggccaaagcactctccagtgagaactcggaccacagcctcccgctggtggaatttttggagcaggttttctgacttcggtcggaaaacccct

SEQ ID NO: 13 - DNA, 141 bp, synthetic construct
  source 1..141: mol_type = other DNA
gtgagcatcttgaatgtggttgtattgccggcaccattcactcccaggaggccaaagcactctccagtgagaactcggaccacagcctcccgctggtggaatttttggagcaggttttctgacttcggtcggaaaacccct

SEQ ID NO: 14 - DNA, 146 bp, synthetic construct
  source 1..146: mol_type = other DNA
ccccagtgagcatcttgaatgtggttgtattgccggcaccattcactcccaggaggccaaagcactctccagtgagaactcggaccacagcctcccgctggtggaatttttggagcaggttttctgacttcggtcggaaaacccct

SEQ ID NO: 15 - DNA, 131 bp, synthetic construct
  source 1..131: mol_type = other DNA
tgaatgtggttgtattgccgggtggtatcactcccaggaggccaaagcactctccagtgagaactcggactgttggctgtcgctggtggaatttttggagcaggttttctgacttcggtcggaaaacccct

SEQ ID NO: 16 - DNA, 131 bp, synthetic construct
  source 1..131: mol_type = other DNA
tgaatgtggttgtattgccggcacgtaagtctcccaggaggccaaagcactctccagtgagaactcggactgttggctgtcgctggtggaatttttggagcaggttttctgacttcggtcggaaaacccct

SEQ ID NO: 17 - DNA, 131 bp, synthetic construct
  source 1..131: mol_type = other DNA
tgaatgtggttgtattgccggcaccatagtgagccaggaggccaaagcactctccagtgagaactcggactgttggctgtcgctggtggaatttttggagcaggttttctgacttcggtcggaaaacccct

SEQ ID NO: 18 - DNA, 131 bp, synthetic construct
  source 1..131: mol_type = other DNA
tgaatgtggttgtattgccggcaccattcagagggtggaggccaaagcactctccagtgagaactcggactgttggctgtcgctggtggaatttttggagcaggttttctgacttcggtcggaaaacccct

SEQ ID NO: 19 - DNA, 131 bp, synthetic construct
  source 1..131: mol_type = other DNA
tgaatgtggttgtattgccggcaccattcactcggtcctggccaaagcactctccagtgagaactcggactgttggctgtcgctggtggaatttttggagcaggttttctgacttcggtcggaaaacccct

SEQ ID NO: 20 - DNA, 131 bp, synthetic construct
  source 1..131: mol_type = other DNA
tgaatgtggttgtattgccggcaccattcactcccacctccgcaaagcactctccagtgagaactcggactgttggctgtcgctggtggaatttttggagcaggttttctgacttcggtcggaaaacccct

SEQ ID NO: 21 - DNA, 131 bp, synthetic construct
  source 1..131: mol_type = other DNA
tgaatgtggttgtattgccggcaccattcactcccaggagcggtttgcactctccagtgagaactcggactgttggctgtcgctggtggaatttttggagcaggttttctgacttcggtcggaaaacccct

SEQ ID NO: 22 - DNA, 131 bp, synthetic construct
  source 1..131: mol_type = other DNA
tgaatgtggttgtattgccggcaccattcactcccaggaggcctttcgtctctccagtgagaactcggactgttggctgtcgctggtggaatttttggagcaggttttctgacttcggtcggaaaacccct

SEQ ID NO: 23 - DNA, 131 bp, synthetic construct; identical to SEQ ID NO: 11
  source 1..131: mol_type = other DNA

SEQ ID NO: 24 - DNA, 131 bp, synthetic construct
  source 1..131: mol_type = other DNA
tgaatgtggttgttttgccggcaccatagtgagccaggaggccaaagcactctccagtgagaactcggacacacagcgacagcacgtggaatttttggagcaggttttctgacttcggtcggaaaacccct

SEQ ID NO: 25 - DNA, 131 bp, synthetic construct
  source 1..131: mol_type = other DNA
tgaatgtggttgttttgccggcaccatagtgagccaggaggccaaagcactctccagtgagaactcggacacacagggacaccacgtggaatttttggagcaggttttctgacttcggtcggaaaacccct

SEQ ID NO: 26 - DNA, 131 bp, synthetic construct
  source 1..131: mol_type = other DNA
tgaatgtggttgttttgccggcaccatagtgagccaggaggccaaagcactctccagtgagaactcggacacacacggactccacgtggaatttttggagcaggttttctgacttcggtcggaaaacccct

SEQ ID NO: 27 - DNA, 131 bp, synthetic construct
  source 1..131: mol_type = other DNA
tgaatgtggttgttttgccggcaccatagtgagccaggaggccaaagcactctccagtgagaactcggacacactcggagtccacgtggaatttttggagcaggttttctgacttcggtcggaaaacccct

SEQ ID NO: 28 - DNA, 131 bp, synthetic construct
  source 1..131: mol_type = other DNA
tgaatgtggttgttttgccggcaccatagtgagccaggaggccaaagcactctccagtgagaactcggacacattcggtgtccacgtggaatttttggagcaggttttctgacttcggtcggaaaacccct

SEQ ID NO: 29 - DNA, 131 bp, synthetic construct
  source 1..131: mol_type = other DNA
tgaatgtggttgttttgccggcaccatagtgagccaggaggccaaagcactctccagtgagaactcggacactttcgctgtccacgtggaatttttggagcaggttttctgacttcggtcggaaaacccct

SEQ ID NO: 30 - DNA, 131 bp, synthetic construct
  source 1..131: mol_type = other DNA
tgaatgtggttgttttgccggcaccatagtgagccaggaggccaaagcactctccagtgagaactcggacagtttccctgtccacgtggaatttttggagcaggttttctgacttcggtcggaaaacccct

SEQ ID NO: 31 - DNA, 131 bp, synthetic construct
  source 1..131: mol_type = other DNA
tgaatgtggttgttttgccggcaccatagtgagccaggaggccaaagcactctccagtgagaactcggactgttggcctgtccacgtggaatttttggagcaggttttctgacttcggtcggaaaacccct

SEQ ID NO: 32 - DNA, 131 bp, synthetic construct
  source 1..131: mol_type = other DNA
tgaatgtggttgtattgccggcaccatagtgagccaggaggccaaagcactctccagtgagaactcggactgttggcctgtccacgtggaatttttggagcaggttttctgacttcggtcggaaaacccct

SEQ ID NO: 33 - DNA, 131 bp, synthetic construct; identical to SEQ ID NO: 17
  source 1..131: mol_type = other DNA

SEQ ID NO: 34 - DNA, 146 bp, synthetic construct
  source 1..146: mol_type = other DNA
tgagaactcggaccacagcctcccgctgctgggctggaggtgcctggataaatcttggttagttcatgtagccttaagatgtcagtattatttccaccaggtggaatttttggagcaggttttctgacttcggtcggaaaacccct

SEQ ID NO: 35 - DNA, 146 bp, synthetic construct
  source 1..146: mol_type = other DNA
cagtgagaactcggaccacagcctcccgctgctgggctggaggtgcctggataaatcttggttagttcatgtagccttaagatgtcagtattatttccacgtggaatttttggagcaggttttctgacttcggtcggaaaacccct

SEQ ID NO: 36 - DNA, 146 bp, synthetic construct
  source 1..146: mol_type = other DNA
actctccagtgagaactcggaccacagcctcccgcactgctgggctggaggtgcctggataaatcttggttagttcatgtagccttaagatgtcagtattgtggaatttttggagcaggttttctgacttcggtcggaaaacccct

SEQ ID NO: 37 - DNA, 146 bp, synthetic construct
  source 1..146: mol_type = other DNA
gcactctccagtgagaactcggaccacagcctcccgctgctgggctggaggtgcctggataaatcttggttagttcatgtagccttaagatgtcagtattgtggaatttttggagcaggttttctgacttcggtcggaaaacccct

SEQ ID NO: 38 - DNA, 146 bp, synthetic construct
  source 1..146: mol_type = other DNA
aaagcactctccagtgagaactcggaccacagcctcccgcactgctgggctggaggtgcctggataaatcttggttagttcatgtagccttaagatgtcagtggaatttttggagcaggttttctgacttcggtcggaaaacccct

SEQ ID NO: 39 - DNA, 146 bp, synthetic construct
  source 1..146: mol_type = other DNA
ccaaagcactctccagtgagaactcggaccacagcctcccgcactgctgggctggaggtgcctggataaatcttggttagttcatgtagccttaagatgtgtggaatttttggagcaggttttctgacttcggtcggaaaacccct

SEQ ID NO: 40 - DNA, 146 bp, synthetic construct
  source 1..146: mol_type = other DNA
aggccaaagcactctccagtgagaactcggaccacagcctcccgcactgctgggctggaggtgcctggataaatcttggttagttcatgtagccttaagagtggaatttttggagcaggttttctgacttcggtcggaaaacccct

SEQ ID NO: 41 - DNA, 146 bp, synthetic construct
  source 1..146: mol_type = other DNA
ggaggccaaagcactctccagtgagaactcggaccacagcctcccgctgctgggctggaggtgcctggataaatcttggttagttcatgtagccttaagagtggaatttttggagcaggttttctgacttcggtcggaaaacccct

SEQ ID NO: 42 - DNA, 146 bp, synthetic construct
  source 1..146: mol_type = other DNA
ccaggaggccaaagcactctccagtgagaactcggaccacagcctcccgcactgctgggctggaggtgcctggataaatcttggttagttcatgtagcctgtggaatttttggagcaggttttctgacttcggtcggaaaacccct

SEQ ID NO: 43 - DNA, 146 bp, synthetic construct
  source 1..146: mol_type = other DNA
tcccaggaggccaaagcactctccagtgagaactcggaccacagcctcccgcactgctgggctggaggtgcctggataaatcttggttagttcatgtagcgtggaatttttggagcaggttttctgacttcggtcggaaaacccct

SEQ ID NO: 44 - DNA, 146 bp, synthetic construct
  source 1..146: mol_type = other DNA
actcccaggaggccaaagcactctccagtgagaactcggaccacagcctcccgcactgctgggctggaggtgcctggataaatcttggttagttcatgtagtggaatttttggagcaggttttctgacttcggtcggaaaacccct

SEQ ID NO: 45 - DNA, 146 bp, synthetic construct
  source 1..146: mol_type = other DNA
ttcactcccaggaggccaaagcactctccagtgagaactcggaccacagcctcccgctgctgggctggaggtgcctggataaatcttggttagttcatgtgtggaatttttggagcaggttttctgacttcggtcggaaaacccct

SEQ ID NO: 46 - DNA, 146 bp, synthetic construct
  source 1..146: mol_type = other DNA
caccattcactcccaggaggccaaagcactctccagtgagaactcggaccacagcctcccgctgctgggctggaggtgcctggataaatcttggttagttgtggaatttttggagcaggttttctgacttcggtcggaaaacccct

SEQ ID NO: 47 - DNA, 146 bp, synthetic construct
  source 1..146: mol_type = other DNA
gccggcaccattcactcccaggaggccaaagcactctccagtgagaactcggaccacagcctcccgctgctgggctggaggtgcctggataaatcttggtgtggaatttttggagcaggttttctgacttcggtcggaaaacccct

SEQ ID NO: 48 - DNA, 146 bp, synthetic construct
  source 1..146: mol_type = other DNA
gtattgccggcaccattcactcccaggaggccaaagcactctccagtgagaactcggaccacagcctcccgctgctgggctggaggtgcctggataaatcgtggaatttttggagcaggttttctgacttcggtcggaaaacccct

SEQ ID NO: 49 - DNA, 146 bp, synthetic construct
  source 1..146: mol_type = other DNA
tggttgtattgccggcaccattcactcccaggaggccaaagcactctccagtgagaactcggaccacagcctcccgctgctgggctggaggtgcctggatgtggaatttttggagcaggttttctgacttcggtcggaaaacccct

SEQ ID NO: 50 - DNA, 146 bp, synthetic construct
  source 1..146: mol_type = other DNA
gaatgtggttgtattgccggcaccattcactcccaggaggccaaagcactctccagtgagaactcggaccacagcctcccgcactgctgggctggaggtggtggaatttttggagcaggttttctgacttcggtcggaaaacccct

SEQ ID NO: 51 - DNA, 146 bp, synthetic construct
  source 1..146: mol_type = other DNA
ttgaatgtggttgtattgccggcaccattcactcccaggaggccaaagcactctccagtgagaactcggaccacagcctcccgcactgctgggctggagggtggaatttttggagcaggttttctgacttcggtcggaaaacccct

SEQ ID NO: 52 - DNA, 146 bp, synthetic construct
  source 1..146: mol_type = other DNA
atcttgaatgtggttgtattgccggcaccattcactcccaggaggccaaagcactctccagtgagaactcggaccacagcctcccgctgctgggctggaggtggaatttttggagcaggttttctgacttcggtcggaaaacccct

SEQ ID NO: 53 - DNA, 146 bp, synthetic construct
  source 1..146: mol_type = other DNA
gcatcttgaatgtggttgtattgccggcaccattcactcccaggaggccaaagcactctccagtgagaactcggaccacagcctcccgcactgctgggctgtggaatttttggagcaggttttctgacttcggtcggaaaacccct

SEQ ID NO: 54 - DNA, 146 bp, synthetic construct
  source 1..146: mol_type = other DNA
tgagcatcttgaatgtggttgtattgccggcaccattcactcccaggaggccaaagcactctccagtgagaactcggaccacagcctcccgcactgctgggtggaatttttggagcaggttttctgacttcggtcggaaaacccct

SEQ ID NO: 55 - DNA, 146 bp, synthetic construct
  source 1..146: mol_type = other DNA
cagtgagcatcttgaatgtggttgtattgccggcaccattcactcccaggaggccaaagcactctccagtgagaactcggaccacagcctcccgcactgcgtggaatttttggagcaggttttctgacttcggtcggaaaacccct

SEQ ID NO: 56 - DNA, 146 bp, synthetic construct; identical to SEQ ID NO: 14
  source 1..146: mol_type = other DNA

SEQ ID NO: 57 - DNA, 146 bp, synthetic construct
  source 1..146: mol_type = other DNA
tgtccccagtgagcatcttgaatgtggttgtattgccggcaccattcactcccaggaggccaaagcactctccagtgagaactcggaccacagcctcccggtggaatttttggagcaggttttctgacttcggtcggaaaacccct

SEQ ID NO: 58 - DNA, 146 bp, synthetic construct
  source 1..146: mol_type = other DNA
atcttgaatgtggttgtattgccgcgtggtttcactcccaggaggccaaagcactctccagtgagaactcggactgtgtccctcccgctgctgggctggagtggaatttttggagcaggttttctgacttcggtcggaaaacccct

SEQ ID NO: 59 - DNA, 146 bp, synthetic construct
  source 1..146: mol_type = other DNA
atcttgaatgtggttgtattgccggctggtaacactcccaggaggccaaagcactctccagtgagaactcggactgtgtccctcccgctgctgggctggagtggaatttttggagcaggttttctgacttcggtcggaaaacccct

SEQ ID NO: 60 - DNA, 146 bp, synthetic construct
  source 1..146: mol_type = other DNA
atcttgaatgtggttgtattgccggcacgtaagtctcccaggaggccaaagcactctccagtgagaactcggactgtgtccctcccgctgctgggctggagtggaatttttggagcaggttttctgacttcggtcggaaaacccct

SEQ ID NO: 61 - DNA, 146 bp, synthetic construct
  source 1..146: mol_type = other DNA
atcttgaatgtggttgtattgccggcaccaaagtgacccaggaggccaaagcactctccagtgagaactcggactgtgtccctcccgctgctgggctggagtggaatttttggagcaggttttctgacttcggtcggaaaacccct

SEQ ID NO: 62 - DNA, 146 bp, synthetic construct
  source 1..146: mol_type = other DNA
atcttgaatgtggttgtattgccggcaccattgtgaggcaggaggccaaagcactctccagtgagaactcggactgtgtccctcccgctgctgggctggagtggaatttttggagcaggttttctgacttcggtcggaaaacccct

SEQ ID NO: 63 - DNA, 146 bp, synthetic construct
  source 1..146: mol_type = other DNA
atcttgaatgtggttgtattgccggcaccattcagagggtggaggccaaagcactctccagtgagaactcggactgtgtccctcccgctgctgggctggagtggaatttttggagcaggttttctgacttcggtcggaaaacccct

SEQ ID NO: 64 - DNA, 146 bp, synthetic construct
  source 1..146: mol_type = other DNA
atcttgaatgtggttgtattgccggcaccattcactcggtcctggccaaagcactctccagtgagaactcggactgtgtccctcccgctgctgggctggagtggaatttttggagcaggttttctgacttcggtcggaaaacccct

SEQ ID NO: 65 - DNA, 146 bp, synthetic construct
  source 1..146: mol_type = other DNA
atcttgaatgtggttgtattgccggcaccattcactccctcctccccaaagcactctccagtgagaactcggactgtgtccctcccgctgctgggctggagtggaatttttggagcaggttttctgacttcggtcggaaaacccct

SEQ ID NO: 66 - DNA, 146 bp, synthetic construct
  source 1..146: mol_type = other DNA
atcttgaatgtggttgtattgccggcaccattcactcccagctccggaaagcactctccagtgagaactcggactgtgtccctcccgctgctgggctggagtggaatttttggagcaggttttctgacttcggtcggaaaacccct

SEQ ID NO: 67 - DNA, 146 bp, synthetic construct
  source 1..146: mol_type = other DNA
atcttgaatgtggttgtattgccggcaccattcactcccaggagcggtttgcactctccagtgagaactcggactgtgtccctcccgctgctgggctggagtggaatttttggagcaggttttctgacttcggtcggaaaacccct

SEQ ID NO: 68 - DNA, 146 bp, synthetic construct
  source 1..146: mol_type = other DNA
atcttgaatgtggttgtattgccggcaccattcactcccaggaggcgtttcgactctccagtgagaactcggactgtgtccctcccgctgctgggctggagtggaatttttggagcaggttttctgacttcggtcggaaaacccct

SEQ ID NO: 69 - DNA, 146 bp, synthetic construct
  source 1..146: mol_type = other DNA
atcttgaatgtggttgtattgccggcaccattcactcccaggaggccattcgtgtctccagtgagaactcggactgtgtccctcccgctgctgggctggagtggaatttttggagcaggttttctgacttcggtcggaaaacccct

SEQ ID NO: 70 - DNA, 146 bp, synthetic construct
  source 1..146: mol_type = other DNA
atcttgaatgtggttgtattgccggcaccattcactcccaggaggccaaacgtgagtccagtgagaactcggactgtgtccctcccgctgctgggctggagtggaatttttggagcaggttttctgacttcggtcggaaaacccct

SEQ ID NO: 71 - DNA, 146 bp, synthetic construct
  source 1..146: mol_type = other DNA
atcttgaatgtggttgtattgccggcaccattcactcccaggaggccaaagctgagagcagtgagaactcggactgtgtccctcccgctgctgggctggagtggaatttttggagcaggttttctgacttcggtcggaaaacccct

SEQ ID NO: 72 - DNA, 146 bp, synthetic construct; identical to SEQ ID NO: 52
  source 1..146: mol_type = other DNA

SEQ ID NO: 73 - DNA, 146 bp, synthetic construct
  source 1..146: mol_type = other DNA
atcttgaatgtggttgttttgccggcaccatagtgagccaggaggccaaagcactctccagtgagaactcggacacacagcctgagtgagctgggctggagtggaatttttggagcaggttttctgacttcggtcggaaaacccct

SEQ ID NO: 74 - DNA, 146 bp, synthetic construct
  source 1..146: mol_type = other DNA
atcttgaatgtggttgttttgccggcaccatagtgagccaggaggccaaagcactctccagtgagaactcggacacacagcctcagtgtgctgggctggagtggaatttttggagcaggttttctgacttcggtcggaaaacccct

SEQ ID NO: 75 - DNA, 146 bp, synthetic construct
  source 1..146: mol_type = other DNA
atcttgaatgtggttgttttgccggcaccatagtgagccaggaggccaaagcactctccagtgagaactcggacacacagccacagactgctgggctggagtggaatttttggagcaggttttctgacttcggtcggaaaacccct

SEQ ID NO: 76 - DNA, 146 bp, synthetic construct
  source 1..146: mol_type = other DNA
atcttgaatgtggttgttttgccggcaccatagtgagccaggaggccaaagcactctccagtgagaactcggacacacagcgacaggctgctgggctggagtggaatttttggagcaggttttctgacttcggtcggaaaacccct

SEQ ID NO: 77 - DNA, 146 bp, synthetic construct
  source 1..146: mol_type = other DNA
atcttgaatgtggttgttttgccggcaccatagtgagccaggaggccaaagcactctccagtgagaactcggacacacagggacacgctgctgggctggagtggaatttttggagcaggttttctgacttcggtcggaaaacccct

SEQ ID NO: 78 - DNA, 146 bp, synthetic construct
  source 1..146: mol_type = other DNA
atcttgaatgtggttgttttgccggcaccatagtgagccaggaggccaaagcactctccagtgagaactcggacacactcggagtcgctgctgggctggagtggaatttttggagcaggttttctgacttcggtcggaaaacccct

SEQ ID NO: 79 - DNA, 146 bp, synthetic construct
  source 1..146: mol_type = other DNA
atcttgaatgtggttgttttgccggcaccatagtgagccaggaggccaaagcactctccagtgagaactcggacagtgtccctgtcgctgctgggctggagtggaatttttggagcaggttttctgacttcggtcggaaaacccct

SEQ ID NO: 80 - DNA, 146 bp, synthetic construct
  source 1..146: mol_type = other DNA
atcttgaatgtggttgttttgccggcaccatagtgagccaggaggccaaagcactctccagtgagaactcggactgtgtccctgtcgctgctgggctggagtggaatttttggagcaggttttctgacttcggtcggaaaacccct

SEQ ID NO: 81 - DNA, 146 bp, synthetic construct; identical to SEQ ID NO: 62
  source 1..146: mol_type = other DNA

SEQ ID NO: 82 - DNA, 124 bp, synthetic construct
  source 1..124: mol_type = other DNA
cggcaccatagtgagccaggaggccaaagcactctccagtgagaactcggacacactcggagtcgctgctgggctggagtggaatttttggagcaggttttctgacttcggtcggaaaacccct

SEQ ID NO: 83 - DNA, 126 bp, synthetic construct
  source 1..126: mol_type = other DNA
gccggcaccatagtgagccaggaggccaaagcactctccagtgagaactcggacacactcggagtcgctgctgggctggagtggaatttttggagcaggttttctgacttcggtcggaaaacccct

SEQ ID NO: 84 - DNA, 128 bp, synthetic construct
  source 1..128: mol_type = other DNA
ttgccggcaccatagtgagccaggaggccaaagcactctccagtgagaactcggacacactcggagtcgctgctgggctggagtggaatttttggagcaggttttctgacttcggtcggaaaacccct

SEQ ID NO: 85 - DNA, 130 bp, synthetic construct
  source 1..130: mol_type = other DNA
ttttgccggcaccatagtgagccaggaggccaaagcactctccagtgagaactcggacacactcggagtcgctgctgggctggagtggaatttttggagcaggttttctgacttcggtcggaaaacccct

SEQ ID NO: 86 - DNA, 132 bp, synthetic construct
  source 1..132: mol_type = other DNA
tgttttgccggcaccatagtgagccaggaggccaaagcactctccagtgagaactcggacacactcggagtcgctgctgggctggagtggaatttttggagcaggttttctgacttcggtcggaaaacccct

SEQ ID NO: 87 - DNA, 134 bp, synthetic construct
  source 1..134: mol_type = other DNA
gttgttttgccggcaccatagtgagccaggaggccaaagcactctccagtgagaactcggacacactcggagtcgctgctgggctggagtggaatttttggagcaggttttctgacttcggtcggaaaacccct

SEQ ID NO: 88 - DNA, 136 bp, synthetic construct
  source 1..136: mol_type = other DNA
tggttgttttgccggcaccatagtgagccaggaggccaaagcactctccagtgagaactcggacacactcggagtcgctgctgggctggagtggaatttttggagcaggttttctgacttcggtcggaaaacccct

SEQ ID NO: 89 - DNA, 138 bp, synthetic construct
  source 1..138: mol_type = other DNA
tgtggttgttttgccggcaccatagtgagccaggaggccaaagcactctccagtgagaactcggacacactcggagtcgctgctgggctggagtggaatttttggagcaggttttctgacttcggtcggaaaacccct

SEQ ID NO: 90 - DNA, 140 bp, synthetic construct
  source 1..140: mol_type = other DNA
aatgtggttgttttgccggcaccatagtgagccaggaggccaaagcactctccagtgagaactcggacacactcggagtcgctgctgggctggagtggaatttttggagcaggttttctgacttcggtcggaaaacccct

SEQ ID NO: 91 - DNA, 142 bp, synthetic construct
  source 1..142: mol_type = other DNA
tgaatgtggttgttttgccggcaccatagtgagccaggaggccaaagcactctccagtgagaactcggacacactcggagtcgctgctgggctggagtggaatttttggagcaggttttctgacttcggtcggaaaacccct

SEQ ID NO: 92 - DNA, 144 bp, synthetic construct
  source 1..144: mol_type = other DNA
cttgaatgtggttgttttgccggcaccatagtgagccaggaggccaaagcactctccagtgagaactcggacacactcggagtcgctgctgggctggagtggaatttttggagcaggttttctgacttcggtcggaaaacccct

SEQ ID NO: 93 - DNA, 146 bp, synthetic construct; identical to SEQ ID NO: 78
  source 1..146: mol_type = other DNA

SEQ ID NO: 94 - DNA, 124 bp, synthetic construct
  source 1..124: mol_type = other DNA
cggcaccatagtgagccaggaggccaaagcactctccagtgagaactcggacacacagcctgagtgagctgggctggagtggaatttttggagcaggttttctgacttcggtcggaaaacccct

SEQ ID NO: 95 - DNA, 126 bp, synthetic construct
  source 1..126: mol_type = other DNA
gccggcaccatagtgagccaggaggccaaagcactctccagtgagaactcggacacacagcctgagtgagctgggctggagtggaatttttggagcaggttttctgacttcggtcggaaaacccct

SEQ ID NO: 96 - DNA, 128 bp, synthetic construct
  source 1..128: mol_type = other DNA
ttgccggcaccatagtgagccaggaggccaaagcactctccagtgagaactcggacacacagcctgagtgagctgggctggagtggaatttttggagcaggttttctgacttcggtcggaaaacccct

SEQ ID NO: 97 - DNA, 130 bp, synthetic construct
  source 1..130: mol_type = other DNA
ttttgccggcaccatagtgagccaggaggccaaagcactctccagtgagaactcggacacacagcctgagtgagctgggctggagtggaatttttggagcaggttttctgacttcggtcggaaaacccct

SEQ ID NO: 98 - DNA, 132 bp, synthetic construct
  source 1..132: mol_type = other DNA
tgttttgccggcaccatagtgagccaggaggccaaagcactctccagtgagaactcggacacacagcctgagtgagctgggctggagtggaatttttggagcaggttttctgacttcggtcggaaaacccct

SEQ ID NO: 99 - DNA, 134 bp, synthetic construct
  source 1..134: mol_type = other DNA
gttgttttgccggcaccatagtgagccaggaggccaaagcactctccagtgagaactcggacacacagcctgagtgagctgggctggagtggaatttttggagcaggttttctgacttcggtcggaaaacccct

SEQ ID NO: 100 - DNA, 136 bp, synthetic construct
  source 1..136: mol_type = other DNA
tggttgttttgccggcaccatagtgagccaggaggccaaagcactctccagtgagaactcggacacacagcctgagtgagctgggctggagtggaatttttggagcaggttttctgacttcggtcggaaaacccct

SEQ ID NO: 101 - DNA, 138 bp, synthetic construct
  source 1..138: mol_type = other DNA
tgtggttgttttgccggcaccatagtgagccaggaggccaaagcactctccagtgagaactcggacacacagcctgagtgagctgggctggagtggaatttttggagcaggttttctgacttcggtcggaaaacccct

SEQ ID NO: 102 - DNA, 140 bp, synthetic construct
  source 1..140: mol_type = other DNA
aatgtggttgttttgccggcaccatagtgagccaggaggccaaagcactctccagtgagaactcggacacacagcctgagtgagctgggctggagtggaatttttggagcaggttttctgacttcggtcggaaaacccct

SEQ ID NO: 103 - DNA, 142 bp, synthetic construct
  source 1..142: mol_type = other DNA
tgaatgtggttgttttgccggcaccatagtgagccaggaggccaaagcactctccagtgagaactcggacacacagcctgagtgagctgggctggagtggaatttttggagcaggttttctgacttcggtcggaaaacccct

SEQ ID NO: 104 - DNA, 144 bp, synthetic construct
  source 1..144: mol_type = other DNA
cttgaatgtggttgttttgccggcaccatagtgagccaggaggccaaagcactctccagtgagaactcggacacacagcctgagtgagctgggctggagtggaatttttggagcaggttttctgacttcggtcggaaaacccct

SEQ ID NO: 105 - DNA, 146 bp, synthetic construct; identical to SEQ ID NO: 78
  source 1..146: mol_type = other DNA

SEQ ID NO: 106 - DNA, 146 bp, synthetic construct
  source 1..146: mol_type = other DNA
ccacagtttcccggaggggccatccacagtcttctgggtggcagtgatggcatggactgtggtcatgagcccttccacgataccaaagttgtcatggatggtggaatttttggagcaggttttctgacttcggtcggaaaacccct

SEQ ID NO: 107 - DNA, 146 bp, synthetic construct
  source 1..146: mol_type = other DNA
ccacagtttcccggaggggccatccacagtcttctgggtggcagtgatggcatggactgtgcagatgagcgcttccacgataggaaagttgtcatggatggtggaatttttggagcaggttttctgacttcggtcggaaaacccct

SEQ ID NO: 108 - DNA, 146 bp, synthetic construct
  source 1..146: mol_type = other DNA
ccacagtttcccggaggggccatccacagtcaagaccgtggcagtgatggcatggactgtgcagatgagcgcttccacctatggaaagttgtcatggatggtggaatttttggagcaggttttctgacttcggtcggaaaacccct

SEQ ID NO: 109 - DNA, 146 bp, synthetic construct
  source 1..146: mol_type = other DNA
ttccccctggagagatgaaaagctttttggctcttaagtctttgataaaaggcgtacataattcttgtgcctactgtacagaatactgccgctagctggagtggaatttttggagcaggttttctgacttcggtcggaaaacccct

SEQ ID NO: 110 - DNA, 146 bp, synthetic construct
  source 1..146: mol_type = other DNA
ttccccctggagagatgaaaagctttttggctcttaagtctttgataaaaggcgtacataaaagttgtgcgtactgtacagaccactgccgctagctggagtggaatttttggagcaggttttctgacttcggtcggaaaacccct

SEQ ID NO: 111 - DNA, 146 bp, synthetic construct
  source 1..146: mol_type = other DNA
ttccccctggagagatgaaaagctttttggcagccttgtctttgataaaaggcgtacataaaagttgtgcgtactgtagtctccactgccgctagctggagtggaatttttggagcaggttttctgacttcggtcggaaaacccct

SEQ ID NO: 112 - DNA, 146 bp, synthetic construct
  source 1..146: mol_type = other DNA
ctgcaaagaacaccaatttttgatgatgaacttcatatcctgagtcatgtcggaattctgcatccatctccacttcagagatctcctccgtcttgatattgtggaatttttggagcaggttttctgacttcggtcggaaaacccct

SEQ ID NO: 113 - DNA, 146 bp, synthetic construct
  source 1..146: mol_type = other DNA
ctgcaaagaacaccaatttttgatgatgaacttcatatcctgagtcatgtcggaattctgccagcatctcgacttcagagatgacctccgtcttgatattgtggaatttttggagcaggttttctgacttcggtcggaaaacccct

SEQ ID NO: 114 - DNA, 146 bp, synthetic construct
  source 1..146: mol_type = other DNA
ctgcaaagaacaccaatttttgatgatgaacaagttttcctgagtcatgtcggaattctgccagcatctcgacttcagtctagacctccgtcttgatattgtggaatttttggagcaggttttctgacttcggtcggaaaacccct

SEQ ID NO: 115 - DNA, 146 bp, synthetic construct
  source 1..146: mol_type = other DNA
tcctgtcccccaacccgtacgtcccagcgtgatcttccatcacttcgaactcctggcggggctcagccaccctggttcaaagttcacctgatagtcgacagtggaatttttggagcaggttttctgacttcggtcggaaaacccct

SEQ ID NO: 116 - DNA, 146 bp, synthetic construct
  source 1..146: mol_type = other DNA
tcctgtcccccaacccgtacgtcccagcgtgatcttccatcacttcgaactcctggcgggggagagccacgctggttcaaagaacacctgatagtcgacagtggaatttttggagcaggttttctgacttcggtcggaaaacccct

SEQ ID NO: 117 - DNA, 146 bp, synthetic construct
  source 1..146: mol_type = other DNA
tcctgtcccccaacccgtacgtcccagcgtgtagaagcatcacttcgaactcctggcgggggagagccacgctggttctttcaacacctgatagtcgacagtggaatttttggagcaggttttctgacttcggtcggaaaacccct

SEQ ID NO: 118 - DNA, 113 bp, synthetic construct
  source 1..113: mol_type = other DNA
ccctggtgtgccctctgatgtttttatccccattctacagcggtactgagcaaatccgtggtcagcaatctttgcaatgatggcagcattgggatacagtgtgaagagcagca

SEQ ID NO: 119 - DNA, 113 bp, synthetic construct
  source 1..113: mol_type = other DNA
ccctggtgtgccctctgatgttttttaggggattctacagcggtactgagcaaatccgtggtcagcaatcaaacgtatgatggcagcattgggatacagtgtgaagagcagca

SEQ ID NO: 120 - DNA, 113 bp, synthetic construct
  source 1..113: mol_type = other DNA
ccctggtgtgccctctgatgtttttatccccattctacatctgtagtgagcaattccgtgctcagcaatctttgcaatgatggcagcattgggatacagtgtgaagagcagca

SEQ ID NO: 121 - DNA, 113 bp, synthetic construct
  source 1..113: mol_type = other DNA
ccctggtgtgccctctgatgttttttaggggattctacatctgtagtgagcaattccgtgctcagcaatcaaacgtatgatggcagcattgggatacagtgtgaagagcagca

SEQ ID NO: 122 - DNA, 113 bp, synthetic construct
  source 1..113: mol_type = other DNA
ccctggtgtgccctctgatgtttttatccccattctacacctggactgagaaatcccgtactcagcaatctttgcaatgatggcagcattgggatacagtgtgaagagcagca

SEQ ID NO: 123 - DNA, 113 bp, synthetic construct
  source 1..113: mol_type = other DNA
ccctggtgtgccctctgatgttttttaggggattctacacctggactgagaaatcccgtactcagcaatcaaacgtatgatggcagcattgggatacagtgtgaagagcagca

SEQ ID NO: 124 - DNA, 113 bp, synthetic construct
  source 1..113: mol_type = other DNA
ccctggtgtgccctctgatgtttttatccccattctacagcagtacggtgcagtgccgtggtcagcaatctttgcaatgatggcagcattgggatacagtgtgaagagcagca

SEQ ID NO: 125 - DNA, 113 bp, synthetic construct
  source 1..113: mol_type = other DNA
ccctggtgtgccctctgatgttttttaggggattctacagcagtacggtgcagtgccgtggtcagcaatcaaacgtatgatggcagcattgggatacagtgtgaagagcagca

SEQ ID NO: 126 - DNA, 113 bp, synthetic construct
  source 1..113: mol_type = other DNA
ccctggtgtgccctctgatgtttttatcccccttctacagcagtagtgagttttgccgtggtcagcaatctttgcaatgatggcagcattgggatacagtgtgaagagcagca

SEQ ID NO: 127 - DNA, 113 bp, synthetic construct
  source 1..113: mol_type = other DNA
ccctggtgtgccctctgatgttttttaggggcttctacagcagtagtgagttttgccgtggtcagcaatcaaacgtatgatggcagcattgggatacagtgtgaagagcagca

SEQ ID NO: 128 - DNA, 113 bp, synthetic construct
  source 1..113: mol_type = other DNA
ccctggtgtgccctctgatgtttttatccccattctacagcagtcctgtacagtgccgtgatcagcaatctttgcaatgatggcagcattgggatacagtgtgaagagcagca

SEQ ID NO: 129 - DNA, 113 bp, synthetic construct
  source 1..113: mol_type = other DNA
ccctggtgtgccctctgatgttttttaggggattctacagcagtcctgtacagtgccgtgatcagcaatcaaacgtatgatggcagcattgggatacagtgtgaagagcagca

SEQ ID NO: 130 - DNA, 113 bp, synthetic construct
  source 1..113: mol_type = other DNA
ccctggtgtgccctctgatgtttttatccccattcgcctgaggtactgaccaatcccgtagttagcctaggctgcaatgatggcagcattgggatacagtgtgaagagcagca

SEQ ID NO: 131 - DNA, 113 bp, synthetic construct
  source 1..113: mol_type = other DNA
ccctggtgtgccctctgatgtttttctacagattctacagcagtacagaggactgccgaggtcaccaatctttgcaataacctgagcattgggatacagtgtgaagagcagca

SEQ ID NO: 132 - DNA, 113 bp, synthetic construct
  source 1..113: mol_type = other DNA
ccctggtgtgccctctgatgttttttaggggattctacagcagtacagaggactgccgaggtcaccaatctttgcatactacgcagcattgggatacagtgtgaagagcagca

SEQ ID NO: 133 - DNA, 113 bp, synthetic construct
  source 1..113: mol_type = other DNA
ccctggtgtgccctctgatgtttttcgggagattctacagcagtacagaggactgccgaggtcaccaatcttgtctaggatggcagcattgggatacagtgtgaagagcagca

SEQ ID NO: 134 - DNA, 113 bp, synthetic construct
  source 1..113: mol_type = other DNA
ccctggtgtgccctctgatgtatgttcccccattctacagcagtacagaggactgccgaggtcaccaacgctaacaatgatggcagcattgggatacagtgtgaagagcagca

SEQ ID NO: 135 - DNA, 113 bp, synthetic construct
  source 1..113: mol_type = other DNA
ccctggtgtgccctctgatgtttttatggaaagtctacagcagtacagaggactgccgaggtcactttgatttgcaatgatggcagcattgggatacagtgtgaagagcagca

SEQ ID NO: 136 - DNA, 113 bp, synthetic construct
  source 1..113: mol_type = other DNA
ccctggtgtgccctctgatgtttttcgaagaattctacagtaggactgagcactgccgagctgggcaatctttgcaatcaaaaaagcattgggatacagtgtgaagagcagca

SEQ ID NO: 137 - DNA, 113 bp, synthetic construct
  source 1..113: mol_type = other DNA
ccctggtgtgccctctgatgttttttaggggattctacagtaggactgagcactgccgagctgggcaatctttgcatactacgcagcattgggatacagtgtgaagagcagca

SEQ ID NO: 138 - DNA, 113 bp, synthetic construct
  source 1..113: mol_type = other DNA
ccctggtgtgccctctgatgtttttctacagattctacagtaggactgagcactgccgagctgggcaatcttcatttggatggcagcattgggatacagtgtgaagagcagca

SEQ ID NO: 139 - DNA, 113 bp, synthetic construct
  source 1..113: mol_type = other DNA
ccctggtgtgccctctgatgtttttatggggtgtctacagtaggactgagcactgccgagctgggcaatcttgagtcggatggcagcattgggatacagtgtgaagagcagca

SEQ ID NO: 140 - DNA, 113 bp, synthetic construct
  source 1..113: mol_type = other DNA
ccctggtgtgccctctgatgtttttatccgaaacatacagtaggactgagcactgccgagctgggcaatcttctcccagatggcagcattgggatacagtgtgaagagcagca

SEQ ID NO: 141 - DNA, 113 bp, synthetic construct
  source 1..113: mol_type = other DNA
ccctggtgtgccctctgatgtttttcatgagattctacagtaggactgagcactgccgagctgggcctcaggtgcaatgatggcagcattgggatacagtgtgaagagcagca

SEQ ID NO: 142 - DNA, 113 bp, synthetic construct
  source 1..113: mol_type = other DNA
ccctggtgtgccctctgatgttttttacagaattctacagtaggactgagcactgccgagctggggttcctttgcaatgatggcagcattgggatacagtgtgaagagcagca

SEQ ID NO: 143 - DNA, 113 bp, synthetic construct
  source 1..113: mol_type = other DNA
ccctggtgtgccctctgatgttttttaggggattctaccgcagtactacccgatcccgtagtcagcaatctttgcatactacgcagcattgggatacagtgtgaagagcagca

SEQ ID NO: 144 - DNA, 113 bp, synthetic construct
  source 1..113: mol_type = other DNA
ccctggtgtgccctctgatgtttttatccccattctagggcagtagggtgcactgccgtggtgggcaatctttgcaatgatggcagcattgggatacagtgtgaagagcagca

SEQ ID NO: 145 - DNA, 113 bp, synthetic construct
  source 1..113: mol_type = other DNA
ccctggtgtgccctctgatgttttttaggggattctagggcagtagggtgcactgccgtggtgggcaatcaaacgtatgatggcagcattgggatacagtgtgaagagcagca

SEQ ID NO: 146 - DNA, 113 bp, synthetic construct
  source 1..113: mol_type = other DNA
ccctggtgtgccctctgatgtttttatccccattctaccgctgtgctgggcaatcccgtggtcagcaatctttgcaatgatggcagcattgggatacagtgtgaagagcagca

SEQ ID NO: 147 - DNA, 113 bp, synthetic construct
  source 1..113: mol_type = other DNA
ccctggtgtgccctctgatgttttttaggggattctaccgctgtgctgggcaatcccgtggtcagcaatctttgcatactacgcagcattgggatacagtgtgaagagcagca

SEQ ID NO: 148 - DNA, 113 bp, synthetic construct
  source 1..113: mol_type = other DNA
ccctggtgtgccctctgatgttttttaggggattctaccgctgtgctgggcaatcccgtggtcagcaatcaaacgtatgatggcagcattgggatacagtgtgaagagcagca

SEQ ID NO: 149 - DNA, 113 bp, synthetic construct
  source 1..113: mol_type = other DNA
ccctggtgtgccctctgatgtttttatccccattctacaacagtacggtgaagtgccgtggtcagcaatctttgcaatgatggcagcattgggatacagtgtgaagagcagca

SEQ ID NO: 150 - DNA, 113 bp, synthetic construct
  source 1..113: mol_type = other DNA
ccctggtgtgccctctgatgttttttaggggattctacaacagtacggtgaagtgccgtggtcagcaatcaaacgtatgatggcagcattgggatacagtgtgaagagcagca

SEQ ID NO: 151 - DNA, 113 bp, synthetic construct
  source 1..113: mol_type = other DNA
ccctggtgtgccctctgatgtttttctagatattctacggcagttcatagcaatcccgtagtcaacaatctttgccattatttgagcattgggatacagtgtgaagagcagca

SEQ ID NO: 152 - DNA, 113 bp, synthetic construct
  source 1..113: mol_type = other DNA
ccctggtgtgccctctgatgtttttcggaggattctacggcagttcatagcaatcccgtagtcaacaagggtccccatgatggcagcattgggatacagtgtgaagagcagca

SEQ ID NO: 153 - DNA, 113 bp, synthetic construct
  source 1..113: mol_type = other DNA
ccctggtgtgccctctgatgtttttatccccatcaccctgcagttcatagcaatcccgtagtcaacaacaatatccatgatggcagcattgggatacagtgtgaagagcagca

SEQ ID NO: 154 - DNA, 113 bp, synthetic construct
  source 1..113: mol_type = other DNA
ccctggtgtgccctctgatgtttttctggtgattctacaacagtactgagctatcccgaattcaacaatctttgcaataagcgaagcattgggatacagtgtgaagagcagca

SEQ ID NO: 155 - DNA, 113 bp, synthetic construct
  source 1..113: mol_type = other DNA
ccctggtgtgccctctgatgtttttatccccattcgaaaaaagtactgagctatcccgaattcaacaatctttgcaatcaatcaagcattgggatacagtgtgaagagcagca

SEQ ID NO: 156 - DNA, 113 bp, synthetic construct
  source 1..113: mol_type = other DNA
ccctggtgtgccctctgatgtttttatccccattcgaataaagtactgagctatcccgaattcaacaatcttctattagatggcagcattgggatacagtgtgaagagcagca

SEQ ID NO: 157 - DNA, 113 bp, synthetic construct
  source 1..113: mol_type = other DNA
ccctggtgtgccctctgatgtttttatccccattctacagcagtagtgtgcagtgccgtggtcatcaatctttgcaatgatggcagcattgggatacagtgtgaagagcagca

SEQ ID NO: 158 - DNA, 113 bp, synthetic construct
  source 1..113: mol_type = other DNA
ccctggtgtgccctctgatgttttttaggggattctacagcagtagtgtgcagtgccgtggtcatcaatcaaacgtatgatggcagcattgggatacagtgtgaagagcagca

SEQ ID NO: 159 - DNA, 113 bp, synthetic construct
  source 1..113: mol_type = other DNA
ccctggtgtgccctctgatgtttttcagtagcttctacagcagttcggaggaatcccgaggtcagcaatctttgcaataagagaagcattgggatacagtgtgaagagcagca

SEQ ID NO: 160 - DNA, 113 bp, synthetic construct
  source 1..113: mol_type = other DNA
ccctggtgtgccctctgatgttttttaggggcttctacagcagttcggaggaatcccgaggtcagcaatctttgcatactacgcagcattgggatacagtgtgaagagcagca

SEQ ID NO: 161 - DNA, 113 bp, synthetic construct
  source 1..113: mol_type = other DNA
ccctggtgtgccctctgatgtttttatggaacgtctacagcagttcggaggaatcccgaggtcagcaatctttggtagcttggcagcattgggatacagtgtgaagagcagca

SEQ ID NO: 162 - DNA, 113 bp, synthetic construct
  source 1..113: mol_type = other DNA
ccctggtgtgccctctgatgtttttatccagcgggtacagcagttcggaggaatcccgaggtcagcaatctttggtcttctggcagcattgggatacagtgtgaagagcagca

SEQ ID NO: 163 - DNA, 113 bp, synthetic construct
  source 1..113: mol_type = other DNA
ccctggtgtgccctctgatgtttcaacggcccttctacagcagttcggaggaatcccgaggtcagcaatcttaccctggatggcagcattgggatacagtgtgaagagcagca

SEQ ID NO: 164 - DNA, 113 bp, synthetic construct
  source 1..113: mol_type = other DNA
ccctggtgtgccctctgatgtttttattgagcctctacagcagttcggaggaatcccgaggtcagcaatcttaaattagatggcagcattgggatacagtgtgaagagcagca

SEQ ID NO: 165 - DNA, 113 bp, synthetic construct
  source 1..113: mol_type = other DNA
ccctggtgtgccctctgatgttttttaggggcttctacagcagttcggaggaatcccgaggtcagcaatcaaacgtatgatggcagcattgggatacagtgtgaagagcagca

SEQ ID NO: 166 - DNA, 113 bp, synthetic construct
  source 1..113: mol_type = other DNA
ccctggtgtgccctctgatgtttttatgaggcgtctacagcagttcggaggaatcccgaggtcagcaagactaacaatgatggcagcattgggatacagtgtgaagagcagca

SEQ ID NO: 167 - DNA, 113 bp, synthetic construct
  source 1..113: mol_type = other DNA
ccctggtgtgccctctgatgtttttattgagcctctacagcagttcggaggaatcccgaggtcagcttagcctgcaatgatggcagcattgggatacagtgtgaagagcagca

SEQ ID NO: 168 - DNA, 45 bp, synthetic construct
  source 1..45: mol_type = other DNA
attctacagcagtactgagcaatgccgtagtcagcaatctttgca

SEQ ID NO: 169 - DNA, 45 bp, synthetic construct
  source 1..45: mol_type = other DNA
attctacggcggtactgaccaatcccgtagttagcaatctttgca

SEQ ID NO: 170 - DNA, 45 bp, synthetic construct
  source 1..45: mol_type = other DNA
attctacagtaggactgagcactgccgagctgggcaatctttgca

SEQ ID NO: 171 - DNA, 45 bp, synthetic construct
  source 1..45: mol_type = other DNA
cttctacagcagttcggaggaatcccgaggtcagcaatctttgca

SEQ ID NO: 172 - RNA, 100 nt, synthetic construct
  source 1..100: mol_type = other RNA
gatattgtgacatatctctgcactcatcacacaaaagatgcaaatcttctatagcaggatcagggagggggcattttaacatatctctgaaaaaccgatc

SEQ ID NO: 173 - RNA, 100 nt, synthetic construct
  source 1..100: mol_type = other RNA
gatattgtgacatatctctgcactcatcacacaaaagatgcaaatcttctatagcctaatcagggagggggcatttcaatatatctctgaaagcgggatc

SEQ ID NO: 174 - RNA, 100 nt, synthetic construct
  source 1..100: mol_type = other RNA
gatattgtgacatatctctgcactcatcacacaaaagatgcaaatcttctatagcacagtcagggagggggcattctaatatatctctgaagcctaaatc

SEQ ID NO: 175 - RNA, 100 nt, synthetic construct
  source 1..100: mol_type = other RNA
gatattgtgacatatctctgcactcatcacacaaaagatgcaaatcttctatagttaaatcagggagggggcatcttaatatatctctgaagccataatc

SEQ ID NO: 176 - RNA, 100 nt, synthetic construct
  source 1..100: mol_type = other RNA
gatattgtgacatatctctgcactcatcacacaaaagatgcaaatcttctatagccgtgtcagggagggggcattttaatatatctctgaaggccaaatc

SEQ ID NO: 177 - RNA, 100 nt, synthetic construct
  source 1..100: mol_type = other RNA
gatattgtgacatatctctgcactcatcacacaaaagatgcaaatcttctatataccgaacagggagggggcattttaacatatctctgaaagatagatc

SEQ ID NO: 178 - RNA, 100 nt, synthetic construct
  source 1..100: mol_type = other RNA
gatattgtgacatatctctgcactcatcacacaaaagatgcaaatcttctatacacgcaacagggagggggcattctaatatatctctgaaatttagatc

SEQ ID NO: 179 - RNA, 100 nt, synthetic construct
  source 1..100: mol_type = other RNA
gatattgtgacatatctctgcactcatcacacaaaagatgcaaatcttctataaaagcaacagggagggggcatcttaatatatctctgaaggggcaatc

SEQ ID NO: 180 - RNA, 100 nt, synthetic construct
  source 1..100: mol_type = other RNA
gatattgtgacatatctctgcactcatcacacaaaagatgcaaatcttctataaacgagacagggagggggcattttaatatatctctgaagggtaaatc

SEQ ID NO: 181 - RNA, 100 nt, synthetic construct
  source 1..100: mol_type = other RNA
gatattgtgacatatctctgcactcatcacacaaaagatgcaaatcttctatcctcaacacagggagggggcattttaacatatctctgaaggaaaaatc

SEQ ID NO: 182 - RNA, 100 nt, synthetic construct
  source 1..100: mol_type = other RNA
gatattgtgacatatctctgcactcatcacacaaaagatgcaaatcttctatcgctggcacagggagggggcatttcaatatatctctgaaggtgggatc

SEQ ID NO: 183 - RNA, 100 nt, synthetic construct
  source 1..100: mol_type = other RNA
gatattgtgacatatctctgcactcatcacacaaaagatgcaaatcttctatccagcacacagggagggggcattctaatatatctctgaaggcacaatc

SEQ ID NO: 184 - RNA, 100 nt, synthetic construct
  source 1..100: mol_type = other RNA
gatattgtgacatatctctgcactcatcacacaaaagatgcaaatcttctatcttgtacacagggagggggcatcttaatatatctctgaaatcgaaatc

SEQ ID NO: 185 - RNA, 100 nt, synthetic construct
  source 1..100: mol_type = other RNA
gatattgtgacatatctctgcactcatcacacaaaagatgcaaatcttctatccagaacacagggagggggcattttaatatatctctgaagatagaatc

SEQ ID NO: 186 - RNA, 100 nt, synthetic construct
  source 1..100: mol_type = other RNA
gatattgtgacatatctctgcactcatcacacaaaagatgcaaatcttctagaaagcccacagggagggggcattttaacatatctctgaaagggggatc

SEQ ID NO: 187 - RNA, 100 nt, synthetic construct
  source 1..100: mol_type = other RNA
gatattgtgacatatctctgcactcatcacacaaaagatgcaaatcttctactcctgccacagggagggggcatttcaatatatctctgaagcacggatc

SEQ ID NO: 188 - RNA, 100 nt, synthetic construct
  source 1..100: mol_type = other RNA
gatattgtgacatatctctgcactcatcacacaaaagatgcaaatcttctacctaacccacagggagggggcattctaatatatctctgaaaccgtaatc

SEQ ID NO: 189 - RNA, 100 nt, synthetic construct
  source 1..100: mol_type = other RNA
gatattgtgacatatctctgcactcatcacacaaaagatgcaaatcttctaatcatcccacagggagggggcatcttaatatatctctgaaaagcagatc

SEQ ID NO: 190 - RNA, 100 nt, synthetic construct
  source 1..100: mol_type = other RNA
gatattgtgacatatctctgcactcatcacacaaaagatgcaaatcttctagcgaaaccacagggagggggcattttaatatatctctgaagagtggatc

SEQ ID NO: 191 - RNA, 100 nt, synthetic construct
  source 1..100: mol_type = other RNA
gatattgtgacatatctctgcactcatcacacaaaagatgcaaatcttcttctacttccacagggagggggcattttaacatatctctgaaatctggatc

SEQ ID NO: 192 - RNA, 100 nt, synthetic construct
  source 1..100: mol_type = other RNA
gatattgtgacatatctctgcactcatcacacaaaagatgcaaatcttcttgcctttccacagggagggggcatttcaatatatctctgaaggtacaatc

SEQ ID NO: 193 - RNA, 100 nt, synthetic construct
  source 1..100: mol_type = other RNA
gatattgtgacatatctctgcactcatcacacaaaagatgcaaatcttcttaccattccacagggagggggcattctaatatatctctgaaggagcgatc

SEQ ID NO: 194 - RNA, 100 nt, synthetic construct
  source 1..100: mol_type = other RNA
gatattgtgacatatctctgcactcatcacacaaaagatgcaaatcttcttcaccttccacagggagggggcatcttaatatatctctgaaggccggatc

SEQ ID NO: 195 - RNA, 100 nt, synthetic construct
  source 1..100: mol_type = other RNA
gatattgtgacatatctctgcactcatcacacaaaagatgcaaatcttcttcaccctccacagggagggggcattttaatatatctctgaaggcagaatc

SEQ ID NO: 196 - RNA, 100 nt, synthetic construct
  source 1..100: mol_type = other RNA
gatattgtgacatatctctgcactcatcacacaaaagatgcaaatcttcgaaaccatccacagggagggggcattttaacatatctctgaagacagaatc

SEQ ID NO: 197 - RNA, 100 nt, synthetic construct
  source 1..100: mol_type = other RNA
gatattgtgacatatctctgcactcatcacacaaaagatgcaaatcttcacaaatatccacagggagggggcatttcaatatatctctgaaagcgagatc

SEQ ID NO: 198 - RNA, 100 nt, synthetic construct
  source 1..100: mol_type = other RNA
gatattgtgacatatctctgcactcatcacacaaaagatgcaaatcttcccccttatccacagggagggggcattctaatatatctctgaagggtggatc

SEQ ID NO: 199 - RNA, 100 nt, synthetic construct
  source 1..100: mol_type = other RNA
gatattgtgacatatctctgcactcatcacacaaaagatgcaaatcttcacccctatccacagggagggggcatcttaatatatctctgaagacgcgatc

SEQ ID NO: 200 - RNA, 100 nt, synthetic construct
  source 1..100: mol_type = other RNA
gatattgtgacatatctctgcactcatcacacaaaagatgcaaatcttcgcaccaatccacagggagggggcattttaatatatctctgaagagccgatc

SEQ ID NO: 201 - RNA, 100 nt, synthetic construct
  source 1..100: mol_type = other RNA
gatattgtgacatatctctgcactcatcacacaaaagatgcaaatcttatcgacgatccacagggagggggcattttaacatatctctgaaacatgaatc

SEQ ID NO: 202 - RNA, 100 nt, synthetic construct
  source 1..100: mol_type = other RNA
gatattgtgacatatctctgcactcatcacacaaaagatgcaaatcttgcccttgatccacagggagggggcatttcaatatatctctgaaactcgaatc

SEQ ID NO: 203 - RNA, 100 nt, synthetic construct
  source 1..100: mol_type = other RNA
gatattgtgacatatctctgcactcatcacacaaaagatgcaaatcttgctcgtgatccacagggagggggcattctaatatatctctgaaagcaagatc

SEQ ID NO: 204 - RNA, 100 nt, synthetic construct
  source 1..100: mol_type = other RNA
gatattgtgacatatctctgcactcatcacacaaaagatgcaaatcttggtgaagatccacagggagggggcatcttaatatatctctgaagccagaatc

SEQ ID NO: 205 - RNA, 100 nt, synthetic construct
  source 1..100: mol_type = other RNA
gatattgtgacatatctctgcactcatcacacaaaagatgcaaatcttgcggtcgatccacagggagggggcattttaatatatctctgaagaccggatc

SEQ ID NO: 206 - RNA, 100 nt, synthetic construct
  source 1..100: mol_type = other RNA
gatattgtgacatatctctgcactcatcacacaaaagatgcaaatctgacctcggatccacagggagggggcatttcaatatatctctgaaatctggatc

SEQ ID NO: 207 - RNA, 100 nt, synthetic construct
  source 1..100: mol_type = other RNA
gatattgtgacatatctctgcactcatcacacaaaagatgcaaatctgattctggatccacagggagggggcattctaatatatctctgaaggttaaatc

SEQ ID NO: 208 - RNA, 100 nt, synthetic construct
  source 1..100: mol_type = other RNA
gatattgtgacatatctctgcactcatcacacaaaagatgcaaatctgcctttggatccacagggagggggcatcttaatatatctctgaaaggccgatc

SEQ ID NO: 209 - RNA, 100 nt, synthetic construct
  source 1..100: mol_type = other RNA
gatattgtgacatatctctgcactcatcacacaaaagatgcaaatctggcctcggatccacagggagggggcattttaatatatctctgaagcgtgaatc

SEQ ID NO: 210 - RNA, 100 nt, synthetic construct
  source 1..100: mol_type = other RNA
gatattgtgacatatctctgcactcatcacacaaaagatgcaaatcgtagtaaggatccacagggagggggcattttaacatatctctgaagaatagatc

SEQ ID NO: 211 - RNA, 100 nt, synthetic construct
  source 1..100: mol_type = other RNA
gatattgtgacatatctctgcactcatcacacaaaagatgcaaatcgacacgaggatccacagggagggggcatttcaatatatctctgaagcatggatc

SEQ ID NO: 212 - RNA, 100 nt, synthetic construct
  source 1..100: mol_type = other RNA
gatattgtgacatatctctgcactcatcacacaaaagatgcaaatcgggcgcaggatccacagggagggggcattctaatatatctctgaagaacgaatc

SEQ ID NO: 213 - RNA, 100 nt, synthetic construct
  source 1..100: mol_type = other RNA
gatattgtgacatatctctgcactcatcacacaaaagatgcaaatcaccacgaggatccacagggagggggcatcttaatatatctctgaaggcaaaatc

SEQ ID NO: 214 - RNA, 100 nt, synthetic construct
  source 1..100: mol_type = other RNA
gatattgtgacatatctctgcactcatcacacaaaagatgcaaatcgtgagcaggatccacagggagggggcattttaatatatctctgaaaacgggatc

SEQ ID NO: 215 - RNA, 100 nt, synthetic construct
  source 1..100: mol_type = other RNA
gatattgtgacatatctctgcactcatcacacaaaagatgcaaatgcaggttaggatccacagggagggggcattttaacatatctctgaagcctcgatc

SEQ ID NO: 216 - RNA, 100 nt, synthetic construct
  source 1..100: mol_type = other RNA
gatattgtgacatatctctgcactcatcacacaaaagatgcaaatagcgtctaggatccacagggagggggcatttcaatatatctctgaagggacaatc

SEQ ID NO: 217 - RNA, 100 nt, synthetic construct
  source 1..100: mol_type = other RNA
gatattgtgacatatctctgcactcatcacacaaaagatgcaaatagcacctaggatccacagggagggggcattctaatatatctctgaaactccaatc

SEQ ID NO: 218 - RNA, 100 nt, synthetic construct
  source 1..100: mol_type = other RNA
gatattgtgacatatctctgcactcatcacacaaaagatgcaaataagatttaggatccacagggagggggcatcttaatatatctctgaaggagcaatc

SEQ ID NO: 219 - RNA, 100 nt, synthetic construct
  source 1..100: mol_type = other RNA
gatattgtgacatatctctgcactcatcacacaaaagatgcaaatgacagctaggatccacagggagggggcattttaatatatctctgaagacccgatc

SEQ ID NO: 220 - RNA, 100 nt, synthetic construct
  source 1..100: mol_type = other RNA
gatattgtgacatatctctgcactcatcacacaaaagatgcaaaagaggcataggatccacagggagggggcattttaacatatctctgaaaacccgatc

SEQ ID NO: 221 - RNA, 100 nt, synthetic construct
  source 1..100: mol_type = other RNA
gatattgtgacatatctctgcactcatcacacaaaagatgcaaagtatggataggatccacagggagggggcatttcaatatatctctgaagcctggatc

SEQ ID NO: 222 - RNA, 100 nt, synthetic construct
  source 1..100: mol_type = other RNA
gatattgtgacatatctctgcactcatcacacaaaagatgcaaaagagcgataggatccacagggagggggcattctaatatatctctgaaattcggatc

SEQ ID NO: 223 - RNA, 100 nt, synthetic construct
  source 1..100: mol_type = other RNA
gatattgtgacatatctctgcactcatcacacaaaagatgcaaaagtaagataggatccacagggagggggcatcttaatatatctctgaaattcggatc

SEQ ID NO: 224 - RNA, 100 nt, synthetic construct
  source 1..100: mol_type = other RNA
gatattgtgacatatctctgcactcatcacacaaaagatgcaaaaaccaaataggatccacagggagggggcattttaatatatctctgaaagggcgatc

SEQ ID NO: 225 - RNA, 100 nt, synthetic construct
  source 1..100: mol_type = other RNA
gatattgtgacatatctctgcactcatcacacaaaagatgcaataaatatataggatccacagggagggggcattttaacatatctctgaaggttggatc

SEQ ID NO: 226 - RNA, 100 nt, synthetic construct
  source 1..100: mol_type = other RNA
gatattgtgacatatctctgcactcatcacacaaaagatgcaacatgaatataggatccacagggagggggcatcttaatatatctctgaaggcgagatc

SEQ ID NO: 227 - RNA, 100 nt, synthetic construct
  source 1..100: mol_type = other RNA
gatattgtgacatatctctgcactcatcacacaaaagatgcatcaagactataggatccacagggagggggcattttaacatatctctgaagccgcgatc

SEQ ID NO: 228 - RNA, 100 nt, synthetic construct
  source 1..100: mol_type = other RNA
gatattgtgacatatctctgcactcatcacacaaaagatgcacaggacctataggatccacagggagggggcatttcaatatatctctgaagcctaaatc

SEQ ID NO: 229 - RNA, 100 nt, synthetic construct
  source 1..100: mol_type = other RNA
gatattgtgacatatctctgcactcatcacacaaaagatgcacctagactataggatccacagggagggggcattctaatatatctctgaaaatacaatc

SEQ ID NO: 230 - RNA, 100 nt, synthetic construct
  source 1..100: mol_type = other RNA
gatattgtgacatatctctgcactcatcacacaaaagatgcacaataactataggatccacagggagggggcatcttaatatatctctgaaacccgaatc

SEQ ID NO: 231 - RNA, 100 nt, synthetic construct
  source 1..100: mol_type = other RNA
gatattgtgacatatctctgcactcatcacacaaaagatgcactgatactataggatccacagggagggggcattttaatatatctctgaagcatagatc

SEQ ID NO: 232 - RNA, 100 nt, synthetic construct
  source 1..100: mol_type = other RNA
gatattgtgacatatctctgcactcatcacacaaaagatgctaacgctctataggatccacagggagggggcattttaacatatctctgaagccgaaatc

SEQ ID NO: 233 - RNA, 100 nt, synthetic construct
  source 1..100: mol_type = other RNA
gatattgtgacatatctctgcactcatcacacaaaagatgctttggctctataggatccacagggagggggcatttcaatatatctctgaagcgcgaatc

SEQ ID NO: 234 - RNA, 100 nt, synthetic construct
  source 1..100: mol_type = other RNA
gatattgtgacatatctctgcactcatcacacaaaagatgcccgccctctataggatccacagggagggggcattctaatatatctctgaaagtaaaatc

SEQ ID NO: 235 - RNA, 100 nt, synthetic construct
  source 1..100: mol_type = other RNA
gatattgtgacatatctctgcactcatcacacaaaagatgctcgggatctataggatccacagggagggggcatcttaatatatctctgaagcccggatc

SEQ ID NO: 236 - RNA, 100 nt, synthetic construct
  source 1..100: mol_type = other RNA
gatattgtgacatatctctgcactcatcacacaaaagatgcccctactctataggatccacagggagggggcattttaatatatctctgaagacaaaatc

SEQ ID NO: 237 - RNA, 100 nt, synthetic construct
  source 1..100: mol_type = other RNA
gatattgtgacatatctctgcactcatcacacaaaagatgagtcgattctataggatccacagggagggggcattttaacatatctctgaagccacaatc

SEQ ID NO: 238 - RNA, 100 nt, synthetic construct
  source 1..100: mol_type = other RNA
gatattgtgacatatctctgcactcatcacacaaaagatgagggagttctataggatccacagggagggggcatttcaatatatctctgaaactccaatc

SEQ ID NO: 239 - RNA, 100 nt, synthetic construct
  source 1..100: mol_type = other RNA
gatattgtgacatatctctgcactcatcacacaaaagatgatacaattctataggatccacagggagggggcattctaatatatctctgaagccgcaatc

SEQ ID NO: 240 - RNA, 100 nt, synthetic construct
  source 1..100: mol_type = other RNA
gatattgtgacatatctctgcactcatcacacaaaagatggctccgttctataggatccacagggagggggcatcttaatatatctctgaaacaaaaatc

SEQ ID NO: 241 - RNA, 100 nt, synthetic construct
  source 1..100: mol_type = other RNA
gatattgtgacatatctctgcactcatcacacaaaagatgaatgcgttctataggatccacagggagggggcattttaatatatctctgaaaggtaaatc

SEQ ID NO: 242 - RNA, 100 nt, synthetic construct
  source 1..100: mol_type = other RNA
gatattgtgacatatctctgcactcatcacacaaaagatctgtcgcttctataggatccacagggagggggcattttaacatatctctgaaatgtagatc

SEQ ID NO: 243 - RNA, 100 nt, synthetic construct
  source 1..100: mol_type = other RNA
gatattgtgacatatctctgcactcatcacacaaaagattaccgacttctataggatccacagggagggggcatttcaatatatctctgaaaacccaatc

SEQ ID NO: 244 - RNA, 100 nt, synthetic construct
  source 1..100: mol_type = other RNA
gatattgtgacatatctctgcactcatcacacaaaagataactagcttctataggatccacagggagggggcattctaatatatctctgaaagtgcaatc

SEQ ID NO: 245 - RNA, 100 nt, synthetic construct
  source 1..100: mol_type = other RNA
gatattgtgacatatctctgcactcatcacacaaaagataaccgacttctataggatccacagggagggggcatcttaatatatctctgaagggaggatc

SEQ ID NO: 246 - RNA, 100 nt, synthetic construct
  source 1..100: mol_type = other RNA
gatattgtgacatatctctgcactcatcacacaaaagattacgcccttctataggatccacagggagggggcattttaatatatctctgaaagcgagatc

SEQ ID NO: 247 - RNA, 100 nt, synthetic construct
  source 1..100: mol_type = other RNA
gatattgtgacatatctctgcactcatcacacaaaagaatttcctcttctataggatccacagggagggggcattttaacatatctctgaaggcgaaatc

SEQ ID NO: 248 - RNA, 100 nt, synthetic construct
  source 1..100: mol_type = other RNA
gatattgtgacatatctctgcactcatcacacaaaagaactacttcttctataggatccacagggagggggcatttcaatatatctctgaaatttaaatc

SEQ ID NO: 249 - RNA, 100 nt, synthetic construct
  source 1..100: mol_type = other RNA
gatattgtgacatatctctgcactcatcacacaaaagaggagcttcttctataggatccacagggagggggcattctaatatatctctgaaaaggggatc

SEQ ID NO: 250 - RNA, 100 nt, synthetic construct
  source 1..100: mol_type = other RNA
gatattgtgacatatctctgcactcatcacacaaaagaccatattcttctataggatccacagggagggggcatcttaatatatctctgaaaataggatc

SEQ ID NO: 251 - RNA, 100 nt, synthetic construct
  source 1..100: mol_type = other RNA
gatattgtgacatatctctgcactcatcacacaaaagaattccttcttctataggatccacagggagggggcattttaatatatctctgaagattagatc

SEQ ID NO: 252 - RNA, 100 nt, synthetic construct
  source 1..100: mol_type = other RNA
gatattgtgacatatctctgcactcatcacacaaaagcttaatatcttctataggatccacagggagggggcattttaacatatctctgaaaattggatc

SEQ ID NO: 253 - RNA, 100 nt, synthetic construct
  source 1..100: mol_type = other RNA
gatattgtgacatatctctgcactcatcacacaaaagtctattatcttctataggatccacagggagggggcatttcaatatatctctgaaggagggatc

SEQ ID NO: 254 - RNA, 100 nt, synthetic construct
  source 1..100: mol_type = other RNA
gatattgtgacatatctctgcactcatcacacaaaagcaatttatcttctataggatccacagggagggggcatcttaatatatctctgaagcccgaatc

SEQ ID NO: 255 - RNA, 100 nt, synthetic construct
  source 1..100: mol_type = other RNA
gatattgtgacatatctctgcactcatcacacaaaagtactctatcttctataggatccacagggagggggcattttaatatatctctgaaggtgcgatc

SEQ ID NO: 256 - RNA, 100 nt, synthetic construct
  source 1..100: mol_type = other RNA
gatattgtgacatatctctgcactcatcacacaaaactcagtaatcttctataggatccacagggagggggcattttaacatatctctgaaggtggaatc

SEQ ID NO: 257 - RNA, 100 nt, synthetic construct
  source 1..100: mol_type = other RNA
gatattgtgacatatctctgcactcatcacacaaaattttttaatcttctataggatccacagggagggggcatttcaatatatctctgaagggcagatc

SEQ ID NO: 258 - RNA, 100 nt, synthetic construct
  source 1..100: mol_type = other RNA
gatattgtgacatatctctgcactcatcacacaaaaaacagtaatcttctataggatccacagggagggggcattctaatatatctctgaaacgggaatc

SEQ ID NO: 259 - RNA, 100 nt, synthetic construct
  source 1..100: mol_type = other RNA
gatattgtgacatatctctgcactcatcacacaaaaacgaacaatcttctataggatccacagggagggggcatcttaatatatctctgaaggacggatc

SEQ ID NO: 260 - RNA, 100 nt, synthetic construct
  source 1..100: mol_type = other RNA
gatattgtgacatatctctgcactcatcacacaaaaatctttaatcttctataggatccacagggagggggcattttaatatatctctgaagatgcgatc

SEQ ID NO: 261 - RNA, 100 nt, synthetic construct
  source 1..100: mol_type = other RNA
gatattgtgacatatctctgcactcatcacacaaactctagaaatcttctataggatccacagggagggggcattttaacatatctctgaagcggagatc

SEQ ID NO: 262 - RNA, 100 nt, synthetic construct
  source 1..100: mol_type = other RNA
gatattgtgacatatctctgcactcatcacacaaattgacaaaatcttctataggatccacagggagggggcatttcaatatatctctgaaatgcggatc

SEQ ID NO: 263 - RNA, 100 nt, synthetic construct
  source 1..100: mol_type = other RNA
gatattgtgacatatctctgcactcatcacacaaattcgtaaaatcttctataggatccacagggagggggcatcttaatatatctctgaagacaaaatc

SEQ ID NO: 264 - RNA, 100 nt, synthetic construct
  source 1..100: mol_type = other RNA
gatattgtgacatatctctgcactcatcacacaacattaacaaatcttctataggatccacagggagggggcattttaacatatctctgaaatccgaatc

SEQ ID NO: 265 - RNA, 100 nt, synthetic construct
  source 1..100: mol_type = other RNA
gatattgtgacatatctctgcactcatcacacaatccccccaaatcttctataggatccacagggagggggcatttcaatatatctctgaagctcaaatc

SEQ ID NO: 266 - RNA, 100 nt, synthetic construct
  source 1..100: mol_type = other RNA
gatattgtgacatatctctgcactcatcacacaatacgcccaaatcttctataggatccacagggagggggcattctaatatatctctgaaagcaaaatc

SEQ ID NO: 267 - RNA, 100 nt, synthetic construct
  source 1..100: mol_type = other RNA
gatattgtgacatatctctgcactcatcacacaactacatcaaatcttctataggatccacagggagggggcatcttaatatatctctgaaaagtgaatc

SEQ ID NO: 268 - RNA, 100 nt, synthetic construct
  source 1..100: mol_type = other RNA
gatattgtgacatatctctgcactcatcacacaaccgcgccaaatcttctataggatccacagggagggggcattttaatatatctctgaagccataatc

SEQ ID NO: 269 - RNA, 100 nt, synthetic construct
  source 1..100: mol_type = other RNA
gatattgtgacatatctctgcactcatcacacacccgcggcaaatcttctataggatccacagggagggggcattttaacatatctctgaagcacggatc

SEQ ID NO: 270 - RNA, 100 nt, synthetic construct
  source 1..100: mol_type = other RNA
gatattgtgacatatctctgcactcatcacacacgcttagcaaatcttctataggatccacagggagggggcatttcaatatatctctgaaacgtagatc

SEQ ID NO: 271 - RNA, 100 nt, synthetic construct
  source 1..100: mol_type = other RNA
gatattgtgacatatctctgcactcatcacacatcccaagcaaatcttctataggatccacagggagggggcattctaatatatctctgaaagttagatc

SEQ ID NO: 272 - RNA, 100 nt, synthetic construct
  source 1..100: mol_type = other RNA
gatattgtgacatatctctgcactcatcacacattccaagcaaatcttctataggatccacagggagggggcatcttaatatatctctgaaacacggatc

SEQ ID NO: 273 - RNA, 100 nt, synthetic construct
  source 1..100: mol_type = other RNA
gatattgtgacatatctctgcactcatcacacatcattagcaaatcttctataggatccacagggagggggcattttaatatatctctgaaattgggatc

SEQ ID NO: 274 - RNA, 100 nt, synthetic construct
  source 1..100: mol_type = other RNA
gatattgtgacatatctctgcactcatcacaccgtatctgcaaatcttctataggatccacagggagggggcattttaacatatctctgaagggacgatc

SEQ ID NO: 275 - RNA, 100 nt, synthetic construct
  source 1..100: mol_type = other RNA
gatattgtgacatatctctgcactcatcacacctggcctgcaaatcttctataggatccacagggagggggcatttcaatatatctctgaaaggcgaatc

SEQ ID NO: 276 - RNA, 100 nt, synthetic construct
  source 1..100: mol_type = other RNA
gatattgtgacatatctctgcactcatcacactaacgttgcaaatcttctataggatccacagggagggggcattctaatatatctctgaaacgcagatc

SEQ ID NO: 277 - RNA, 100 nt, synthetic construct
  source 1..100: mol_type = other RNA
gatattgtgacatatctctgcactcatcacactgtgcttgcaaatcttctataggatccacagggagggggcattttaatatatctctgaagccagaatc

SEQ ID NO: 278 - RNA, 100 nt, synthetic construct
  source 1..100: mol_type = other RNA
gatattgtgacatatctctgcactcatcacagccacaatgcaaatcttctataggatccacagggagggggcattttaacatatctctgaagccacaatc

SEQ ID NO: 279 - RNA, 100 nt, synthetic construct
  source 1..100: mol_type = other RNA
gatattgtgacatatctctgcactcatcacaactctcatgcaaatcttctataggatccacagggagggggcattctaatatatctctgaaaattgaatc

SEQ ID NO: 280 - RNA, 100 nt, synthetic construct
  source 1..100: mol_type = other RNA
gatattgtgacatatctctgcactcatcacaatgtacatgcaaatcttctataggatccacagggagggggcatcttaatatatctctgaaggacagatc

SEQ ID NO: 281 - RNA, 100 nt, synthetic construct
  source 1..100: mol_type = other RNA
gatattgtgacatatctctgcactcatcacaagcgctatgcaaatcttctataggatccacagggagggggcattttaatatatctctgaaaaacaaatc

SEQ ID NO: 282 - RNA, 100 nt, synthetic construct
  source 1..100: mol_type = other RNA
gatattgtgacatatctctgcactcatcactatgttgatgcaaatcttctataggatccacagggagggggcattttaacatatctctgaagcctagatc

SEQ ID NO: 283 - RNA, 100 nt, synthetic construct
  source 1..100: mol_type = other RNA
gatattgtgacatatctctgcactcatcactaatccgatgcaaatcttctataggatccacagggagggggcatttcaatatatctctgaaggacgaatc

SEQ ID NO: 284 - RNA, 100 nt, synthetic construct
  source 1..100: mol_type = other RNA
gatattgtgacatatctctgcactcatcactttagtgatgcaaatcttctataggatccacagggagggggcattctaatatatctctgaaatccaaatc

SEQ ID NO: 285 - RNA, 100 nt, synthetic construct
  source 1..100: mol_type = other RNA
gatattgtgacatatctctgcactcatcactatatcgatgcaaatcttctataggatccacagggagggggcatcttaatatatctctgaagcccgaatc

SEQ ID NO: 286 - RNA, 100 nt, synthetic construct
  source 1..100: mol_type = other RNA
gatattgtgacatatctctgcactcatcacctgtacgatgcaaatcttctataggatccacagggagggggcattttaatatatctctgaagaagagatc

SEQ ID NO: 287 - RNA, 100 nt, synthetic construct
  source 1..100: mol_type = other RNA
gatattgtgacatatctctgcactcatcacacaaaagatgcaaatcttctatagagcggtcagggagggggcattttaacatatctctgataatcccatc

SEQ ID NO: 288 - RNA, 100 nt, synthetic construct
  source 1..100: mol_type = other RNA
gatattgtgacatatctctgcactcatcacacaaaagatgcaaatcttctatagtcaggtcagggagggggcatttcaatatatctctgataattgcatc

SEQ ID NO: 289 - RNA, 100 nt, synthetic construct
  source 1..100: mol_type = other RNA
gatattgtgacatatctctgcactcatcacacaaaagatgcaaatcttctatagacgggtcagggagggggcattctaatatatctctgatcctcgcatc

SEQ ID NO: 290 - RNA, 100 nt, synthetic construct
  source 1..100: mol_type = other RNA
gatattgtgacatatctctgcactcatcacacaaaagatgcaaatcttctatagacaaatcagggagggggcatcttaatatatctctgacggggacatc

SEQ ID NO: 291 - RNA, 100 nt, synthetic construct
  source 1..100: mol_type = other RNA
gatattgtgacatatctctgcactcatcacacaaaagatgcaaatcttctatagacgggtcagggagggggcattttaatatatctctgacagcaacatc

SEQ ID NO: 292 - RNA, 100 nt, synthetic construct
  source 1..100: mol_type = other RNA
gatattgtgacatatctctgcactcatcacacaaaagatgcaaatcttctatacactagacagggagggggcattttaacatatctctgacagttacatc

SEQ ID NO: 293 - RNA, 100 nt, synthetic construct
  source 1..100: mol_type = other RNA
gatattgtgacatatctctgcactcatcacacaaaagatgcaaatcttctataattacaacagggagggggcatttcaatatatctctgacagaagcatc

SEQ ID NO: 294 - RNA, 100 nt, synthetic construct
  source 1..100: mol_type = other RNA
gatattgtgacatatctctgcactcatcacacaaaagatgcaaatcttctataccttagacagggagggggcattctaatatatctctgacggttccatc

SEQ ID NO: 295 - RNA, 100 nt, synthetic construct
  source 1..100: mol_type = other RNA
gatattgtgacatatctctgcactcatcacacaaaagatgcaaatcttctatatatgagacagggagggggcatcttaatatatctctgaccccaccatc

SEQ ID NO: 296 - RNA, 100 nt, synthetic construct
  source 1..100: mol_type = other RNA
gatattgtgacatatctctgcactcatcacacaaaagatgcaaatcttctataaccaagacagggagggggcattttaatatatctctgatccttgcatc

SEQ ID NO: 297 - RNA, 100 nt, synthetic construct
  source 1..100: mol_type = other RNA
gatattgtgacatatctctgcactcatcacacaaaagatgcaaatcttctattttcggcacagggagggggcattttaacatatctctgatgacaacatc

SEQ ID NO: 298 - RNA, 100 nt, synthetic construct
  source 1..100: mol_type = other RNA
gatattgtgacatatctctgcactcatcacacaaaagatgcaaatcttctatttagaacacagggagggggcatttcaatatatctctgacatttgcatc

SEQ ID NO: 299 - RNA, 100 nt, synthetic construct
  source 1..100: mol_type = other RNA
gatattgtgacatatctctgcactcatcacacaaaagatgcaaatcttctatcaccggcacagggagggggcattctaatatatctctgacaggtgcatc

SEQ ID NO: 300 - RNA, 100 nt, synthetic construct
  source 1..100: mol_type = other RNA
gatattgtgacatatctctgcactcatcacacaaaagatgcaaatcttctatttacagcacagggagggggcatcttaatatatctctgacatctgcatc

SEQ ID NO: 301 - RNA, 100 nt, synthetic construct
  source 1..100: mol_type = other RNA
gatattgtgacatatctctgcactcatcacacaaaagatgcaaatcttctatttatgacacagggagggggcattttaatatatctctgatccttccatc

SEQ ID NO: 302 - RNA, 100 nt, synthetic construct
  source 1..100: mol_type = other RNA
gatattgtgacatatctctgcactcatcacacaaaagatgcaaatcttctactcgcaccacagggagggggcattttaacatatctctgattctcacatc

SEQ ID NO: 303 - RNA, 100 nt, synthetic construct
  source 1..100: mol_type = other RNA
gatattgtgacatatctctgcactcatcacacaaaagatgcaaatcttctacgaaacccacagggagggggcatttcaatatatctctgacggtgccatc

SEQ ID NO: 304 - RNA, 100 nt, synthetic construct
  source 1..100: mol_type = other RNA
gatattgtgacatatctctgcactcatcacacaaaagatgcaaatcttctacgcacgccacagggagggggcattctaatatatctctgatggtgccatc

SEQ ID NO: 305 - RNA, 100 nt, synthetic construct
  source 1..100: mol_type = other RNA
gatattgtgacatatctctgcactcatcacacaaaagatgcaaatcttctagtcaccccacagggagggggcatcttaatatatctctgataccaccatc

SEQ ID NO: 306 - RNA, 100 nt, synthetic construct
  source 1..100: mol_type = other RNA
gatattgtgacatatctctgcactcatcacacaaaagatgcaaatcttctaatgtcgccacagggagggggcattttaatatatctctgacaacggcatc

SEQ ID NO: 307 - RNA, 100 nt, synthetic construct
  source 1..100: mol_type = other RNA
gatattgtgacatatctctgcactcatcacacaaaagatgcaaatcttctcaatgctccacagggagggggcattttaacatatctctgatgaaggcatc

SEQ ID NO: 308 - RNA, 100 nt, synthetic construct
  source 1..100: mol_type = other RNA
gatattgtgacatatctctgcactcatcacacaaaagatgcaaatcttctcatcattccacagggagggggcatttcaatatatctctgacagtaccatc

SEQ ID NO: 309 - RNA, 100 nt, synthetic construct
  source 1..100: mol_type = other RNA
gatattgtgacatatctctgcactcatcacacaaaagatgcaaatcttctcgaagttccacagggagggggcattctaatatatctctgatgttcgcatc

SEQ ID NO: 310 - RNA, 100 nt, synthetic construct
  source 1..100: mol_type = other RNA
gatattgtgacatatctctgcactcatcacacaaaagatgcaaatcttctcgccattccacagggagggggcatcttaatatatctctgatagccacatc

SEQ ID NO: 311 - RNA, 100 nt, synthetic construct
  source 1..100: mol_type = other RNA
gatattgtgacatatctctgcactcatcacacaaaagatgcaaatcttcttgaatttccacagggagggggcattttaatatatctctgacgaccgcatc

SEQ ID NO: 312 - RNA, 100 nt, synthetic construct
  source 1..100: mol_type = other RNA
gatattgtgacatatctctgcactcatcacacaaaagatgcaaatcttcgccgaaatccacagggagggggcattttaacatatctctgataaaaacatc

SEQ ID NO: 313 - RNA, 100 nt, synthetic construct
  source 1..100: mol_type = other RNA
gatattgtgacatatctctgcactcatcacacaaaagatgcaaatcttcgtgtccatccacagggagggggcatttcaatatatctctgaccatgccatc

SEQ ID NO: 314 - RNA, 100 nt, synthetic construct
  source 1..100: mol_type = other RNA
gatattgtgacatatctctgcactcatcacacaaaagatgcaaatcttccccgccatccacagggagggggcatcttaatatatctctgatcaacccatc

SEQ ID NO: 315 - RNA, 100 nt, synthetic construct
  source 1..100: mol_type = other RNA
gatattgtgacatatctctgcactcatcacacaaaagatgcaaatcttcgttcccatccacagggagggggcattttaatatatctctgatagtcccatc

SEQ ID NO: 316 - RNA, 100 nt, synthetic construct
  source 1..100: mol_type = other RNA
gatattgtgacatatctctgcactcatcacacaaaagatgcaaatcttagaacagatccacagggagggggcattttaacatatctctgatcccgacatc

SEQ ID NO: 317 - RNA, 100 nt, synthetic construct
  source 1..100: mol_type = other RNA
gatattgtgacatatctctgcactcatcacacaaaagatgcaaatcttagcgtcgatccacagggagggggcatttcaatatatctctgatgtccccatc

SEQ ID NO: 318 - RNA, 100 nt, synthetic construct
  source 1..100: mol_type = other RNA
gatattgtgacatatctctgcactcatcacacaaaagatgcaaatcttgcaacagatccacagggagggggcattctaatatatctctgatttcaacatc

SEQ ID NO: 319 - RNA, 100 nt, synthetic construct
  source 1..100: mol_type = other RNA
gatattgtgacatatctctgcactcatcacacaaaagatgcaaatcttggacacgatccacagggagggggcatcttaatatatctctgatggccgcatc

SEQ ID NO: 320 - RNA, 100 nt, synthetic construct
  source 1..100: mol_type = other RNA
gatattgtgacatatctctgcactcatcacacaaaagatgcaaatcttatcatagatccacagggagggggcattttaatatatctctgaccagcgcatc

SEQ ID NO: 321 - RNA, 100 nt, synthetic construct
  source 1..100: mol_type = other RNA
gatattgtgacatatctctgcactcatcacacaaaagatgcaaatctgggaatggatccacagggagggggcattttaacatatctctgataccgccatc

SEQ ID NO: 322 - RNA, 100 nt, synthetic construct
  source 1..100: mol_type = other RNA
gatattgtgacatatctctgcactcatcacacaaaagatgcaaatctatggatggatccacagggagggggcatttcaatatatctctgatagttgcatc

SEQ ID NO: 323 - RNA, 100 nt, synthetic construct
  source 1..100: mol_type = other RNA
gatattgtgacatatctctgcactcatcacacaaaagatgcaaatctcacgatggatccacagggagggggcattctaatatatctctgacatcggcatc

SEQ ID NO: 324 - RNA, 100 nt, synthetic construct
  source 1..100: mol_type = other RNA
gatattgtgacatatctctgcactcatcacacaaaagatgcaaatctgggtttggatccacagggagggggcatcttaatatatctctgattcccgcatc

SEQ ID NO: 325 - RNA, 100 nt, synthetic construct
  source 1..100: mol_type = other RNA
gatattgtgacatatctctgcactcatcacacaaaagatgcaaatctcaatccggatccacagggagggggcattttaatatatctctgacgattacatc

SEQ ID NO: 326 - RNA, 100 nt, synthetic construct
  source 1..100: mol_type = other RNA
gatattgtgacatatctctgcactcatcacacaaaagatgcaaatccctccaaggatccacagggagggggcattttaacatatctctgatgagcacatc

SEQ ID NO: 327 - RNA, 100 nt, synthetic construct
  source 1..100: mol_type = other RNA
gatattgtgacatatctctgcactcatcacacaaaagatgcaaatcctggtgaggatccacagggagggggcatttcaatatatctctgattcgagcatc

SEQ ID NO: 328 - RNA, 100 nt, synthetic construct
  source 1..100: mol_type = other RNA
gatattgtgacatatctctgcactcatcacacaaaagatgcaaatccaacgcaggatccacagggagggggcattctaatatatctctgaccaagacatc

SEQ ID NO: 329 - RNA, 100 nt, synthetic construct
  source 1..100: mol_type = other RNA
gatattgtgacatatctctgcactcatcacacaaaagatgcaaatcaaaaaaaggatccacagggagggggcatcttaatatatctctgattaccccatc

SEQ ID NO: 330 - RNA, 100 nt, synthetic construct
  source 1..100: mol_type = other RNA
gatattgtgacatatctctgcactcatcacacaaaagatgcaaatcagtagcaggatccacagggagggggcattttaatatatctctgatcctcacatc

SEQ ID NO: 331 - RNA, 100 nt, synthetic construct
  source 1..100: mol_type = other RNA
gatattgtgacatatctctgcactcatcacacaaaagatgcaaataagtactaggatccacagggagggggcattttaacatatctctgatggaggcatc

SEQ ID NO: 332 - RNA, 100 nt, synthetic construct
  source 1..100: mol_type = other RNA
gatattgtgacatatctctgcactcatcacacaaaagatgcaaatgcgaattaggatccacagggagggggcatttcaatatatctctgacagcaccatc

SEQ ID NO: 333 - RNA, 100 nt, synthetic construct
  source 1..100: mol_type = other RNA
gatattgtgacatatctctgcactcatcacacaaaagatgcaaatgaacattaggatccacagggagggggcattctaatatatctctgattgtcgcatc

SEQ ID NO: 334 - RNA, 100 nt, synthetic construct
  source 1..100: mol_type = other RNA
gatattgtgacatatctctgcactcatcacacaaaagatgcaaatatcaattaggatccacagggagggggcattttaatatatctctgatgtccacatc

SEQ ID NO: 335 - RNA, 100 nt, synthetic construct
  source 1..100: mol_type = other RNA
gatattgtgacatatctctgcactcatcacacaaaagatgcaaaatatagataggatccacagggagggggcattttaacatatctctgataggcccatc

SEQ ID NO: 336 - RNA, 100 nt, synthetic construct
  source 1..100: mol_type = other RNA
gatattgtgacatatctctgcactcatcacacaaaagatgcaaagtaccaataggatccacagggagggggcatttcaatatatctctgatgttcgcatc

SEQ ID NO: 337 - RNA, 100 nt, synthetic construct
  source 1..100: mol_type = other RNA
gatattgtgacatatctctgcactcatcacacaaaagatgcaaacgtaaaataggatccacagggagggggcattctaatatatctctgacattcccatc

SEQ ID NO: 338 - RNA, 100 nt, synthetic construct
  source 1..100: mol_type = other RNA
gatattgtgacatatctctgcactcatcacacaaaagatgcaaacaagaaataggatccacagggagggggcatcttaatatatctctgatgtcaccatc

SEQ ID NO: 339 - RNA, 100 nt, synthetic construct
  source 1..100: mol_type = other RNA
gatattgtgacatatctctgcactcatcacacaaaagatgcaaaagggggataggatccacagggagggggcattttaatatatctctgatccaggcatc

SEQ ID NO: 340 - RNA, 100 nt, synthetic construct
  source 1..100: mol_type = other RNA
gatattgtgacatatctctgcactcatcacacaaaagatgcaacagcgatataggatccacagggagggggcattttaacatatctctgatcccggcatc

SEQ ID NO: 341 - RNA, 100 nt, synthetic construct
  source 1..100: mol_type = other RNA
gatattgtgacatatctctgcactcatcacacaaaagatgcaactacagtataggatccacagggagggggcatttcaatatatctctgacagcagcatc

SEQ ID NO: 342 - RNA, 100 nt, synthetic construct
  source 1..100: mol_type = other RNA
gatattgtgacatatctctgcactcatcacacaaaagatgcaatgagagtataggatccacagggagggggcattctaatatatctctgacgaaaacatc

SEQ ID NO: 343 - RNA, 100 nt, synthetic construct
  source 1..100: mol_type = other RNA
gatattgtgacatatctctgcactcatcacacaaaagatgcaaccgcagtataggatccacagggagggggcatcttaatatatctctgacagttccatc

SEQ ID NO: 344 - RNA, 100 nt, synthetic construct
  source 1..100: mol_type = other RNA
gatattgtgacatatctctgcactcatcacacaaaagatgcaatgtgagtataggatccacagggagggggcattttaatatatctctgacagtcccatc

SEQ ID NO: 345 - RNA, 100 nt, synthetic construct
  source 1..100: mol_type = other RNA
gatattgtgacatatctctgcactcatcacacaaaagatgcacgcaagctataggatccacagggagggggcattttaacatatctctgatgacagcatc

SEQ ID NO: 346 - RNA, 100 nt, synthetic construct
  source 1..100: mol_type = other RNA
gatattgtgacatatctctgcactcatcacacaaaagatgcatcagtgctataggatccacagggagggggcatttcaatatatctctgattcggacatc

SEQ ID NO: 347 - RNA, 100 nt, synthetic construct
  source 1..100: mol_type = other RNA
gatattgtgacatatctctgcactcatcacacaaaagatgcatctatgctataggatccacagggagggggcattctaatatatctctgattaaagcatc

SEQ ID NO: 348 - RNA, 100 nt, synthetic construct
  source 1..100: mol_type = other RNA
gatattgtgacatatctctgcactcatcacacaaaagatgcaccaggcctataggatccacagggagggggcatcttaatatatctctgatagcgccatc

SEQ ID NO: 349 - RNA, 100 nt, synthetic construct
  source 1..100: mol_type = other RNA
gatattgtgacatatctctgcactcatcacacaaaagatgcactatacctataggatccacagggagggggcattttaatatatctctgatagtcccatc

SEQ ID NO: 350 - RNA, 100 nt, synthetic construct
  source 1..100: mol_type = other RNA
gatattgtgacatatctctgcactcatcacacaaaagatgcctagactctataggatccacagggagggggcattttaacatatctctgacggtaccatc

SEQ ID NO: 351 - RNA, 100 nt, synthetic construct
  source 1..100: mol_type = other RNA
gatattgtgacatatctctgcactcatcacacaaaagatgctgcgactctataggatccacagggagggggcatttcaatatatctctgatacacgcatc

SEQ ID NO: 352 - RNA, 100 nt, synthetic construct
  source 1..100: mol_type = other RNA
gatattgtgacatatctctgcactcatcacacaaaagatgccttgactctataggatccacagggagggggcattctaatatatctctgattatgccatc

SEQ ID NO: 353 - RNA, 100 nt, synthetic construct
  source 1..100: mol_type = other RNA
gatattgtgacatatctctgcactcatcacacaaaagatgccccaagtctataggatccacagggagggggcatcttaatatatctctgacgaggacatc

SEQ ID NO: 354 - RNA, 100 nt, synthetic construct
  source 1..100: mol_type = other RNA
gatattgtgacatatctctgcactcatcacacaaaagatgccgtatatctataggatccacagggagggggcattttaatatatctctgatgcatccatc

SEQ ID NO: 355 - RNA, 100 nt, synthetic construct
  source 1..100: mol_type = other RNA
gatattgtgacatatctctgcactcatcacacaaaagatggtcgaattctataggatccacagggagggggcatttcaatatatctctgacagcgacatc

SEQ ID NO: 356 - RNA, 100 nt, synthetic construct
  source 1..100: mol_type = other RNA
gatattgtgacatatctctgcactcatcacacaaaagatggccccgttctataggatccacagggagggggcattctaatatatctctgattattacatc

SEQ ID NO: 357 - RNA, 100 nt, synthetic construct
  source 1..100: mol_type = other RNA
gatattgtgacatatctctgcactcatcacacaaaagatgagtgagttctataggatccacagggagggggcatcttaatatatctctgatgcctccatc

SEQ ID NO: 358 - RNA, 100 nt, synthetic construct
  source 1..100: mol_type = other RNA
gatattgtgacatatctctgcactcatcacacaaaagatggcccggttctataggatccacagggagggggcattttaatatatctctgacggcgacatc

SEQ ID NO: 359 - RNA, 100 nt, synthetic construct
  source 1..100: mol_type = other RNA
gatattgtgacatatctctgcactcatcacacaaaagatctctgacttctataggatccacagggagggggcattttaacatatctctgacggttacatc

SEQ ID NO: 360 - RNA, 100 nt, synthetic construct
  source 1..100: mol_type = other RNA
gatattgtgacatatctctgcactcatcacacaaaagatattccacttctataggatccacagggagggggcatttcaatatatctctgattgcgccatc

SEQ ID NO: 361 - RNA, 100 nt, synthetic construct
  source 1..100: mol_type = other RNA
gatattgtgacatatctctgcactcatcacacaaaagatctgttccttctataggatccacagggagggggcattctaatatatctctgattacaccatc

SEQ ID NO: 362 - RNA, 100 nt, synthetic construct
  source 1..100: mol_type = other RNA
gatattgtgacatatctctgcactcatcacacaaaagataattgccttctataggatccacagggagggggcattttaatatatctctgacaacgacatc

SEQ ID NO: 363 - RNA, 100 nt, synthetic construct
  source 1..100: mol_type = other RNA
gatattgtgacatatctctgcactcatcacacaaaagaactttctcttctataggatccacagggagggggcatttcaatatatctctgatgttcccatc

SEQ ID NO: 364 - RNA, 100 nt, synthetic construct
  source 1..100: mol_type = other RNA
gatattgtgacatatctctgcactcatcacacaaaagagtcctctcttctataggatccacagggagggggcattctaatatatctctgatagcaacatc

SEQ ID NO: 365 - RNA, 100 nt, synthetic construct
  source 1..100: mol_type = other RNA
gatattgtgacatatctctgcactcatcacacaaaagacagtgttcttctataggatccacagggagggggcatcttaatatatctctgataatcccatc

SEQ ID NO: 366 - RNA, 100 nt, synthetic construct
  source 1..100: mol_type = other RNA
gatattgtgacatatctctgcactcatcacacaaaagagaggtttcttctataggatccacagggagggggcattttaatatatctctgatatccacatc

SEQ ID NO: 367 - RNA, 100 nt, synthetic construct
  source 1..100: mol_type = other RNA
gatattgtgacatatctctgcactcatcacacaaaagtctaacatcttctataggatccacagggagggggcattttaacatatctctgatgcatccatc

SEQ ID NO: 368 - RNA, 100 nt, synthetic construct
  source 1..100: mol_type = other RNA
gatattgtgacatatctctgcactcatcacacaaaagccttttatcttctataggatccacagggagggggcatttcaatatatctctgacggttacatc

SEQ ID NO: 369 - RNA, 100 nt, synthetic construct
  source 1..100: mol_type = other RNA
gatattgtgacatatctctgcactcatcacacaaaagtcaatcatcttctataggatccacagggagggggcattctaatatatctctgattcttccatc

SEQ ID NO: 370 - RNA, 100 nt, synthetic construct
  source 1..100: mol_type = other RNA
gatattgtgacatatctctgcactcatcacacaaaagttaactatcttctataggatccacagggagggggcatcttaatatatctctgacattcccatc

SEQ ID NO: 371 - RNA, 100 nt, synthetic construct
  source 1..100: mol_type = other RNA
gatattgtgacatatctctgcactcatcacacaaaagcaccctatcttctataggatccacagggagggggcattttaatatatctctgacaagggcatc

SEQ ID NO: 372 - RNA, 100 nt, synthetic construct
  source 1..100: mol_type = other RNA
gatattgtgacatatctctgcactcatcacacaaaaccaagtaatcttctataggatccacagggagggggcattttaacatatctctgatccatacatc

SEQ ID NO: 373 - RNA, 100 nt, synthetic construct
  source 1..100: mol_type = other RNA
gatattgtgacatatctctgcactcatcacacaaaactactcaatcttctataggatccacagggagggggcatttcaatatatctctgacccgcccatc

SEQ ID NO: 374 - RNA, 100 nt, synthetic construct
  source 1..100: mol_type = other RNA
gatattgtgacatatctctgcactcatcacacaaaactacctaatcttctataggatccacagggagggggcattctaatatatctctgataagtacatc

SEQ ID NO: 375 - RNA, 100 nt, synthetic construct
  source 1..100: mol_type = other RNA
gatattgtgacatatctctgcactcatcacacaaaatttatcaatcttctataggatccacagggagggggcatcttaatatatctctgacaggcacatc

SEQ ID NO: 376 - RNA, 100 nt, synthetic construct
  source 1..100: mol_type = other RNA
gatattgtgacatatctctgcactcatcacacaaaaatctataatcttctataggatccacagggagggggcattttaatatatctctgattcttgcatc

SEQ ID NO: 377 - RNA, 100 nt, synthetic construct
  source 1..100: mol_type = other RNA
gatattgtgacatatctctgcactcatcacacaaacttagaaaatcttctataggatccacagggagggggcattttaacatatctctgatgggcccatc

SEQ ID NO: 378 - RNA, 100 nt, synthetic construct
  source 1..100: mol_type = other RNA
gatattgtgacatatctctgcactcatcacacaaatcaaaaaaatcttctataggatccacagggagggggcatttcaatatatctctgattcttgcatc

SEQ ID NO: 379 - RNA, 100 nt, synthetic construct
  source 1..100: mol_type = other RNA
gatattgtgacatatctctgcactcatcacacaaatcgccaaaatcttctataggatccacagggagggggcattctaatatatctctgattacgacatc

SEQ ID NO: 380 - RNA, 100 nt, synthetic construct
  source 1..100: mol_type = other RNA
gatattgtgacatatctctgcactcatcacacaaactaacgaaatcttctataggatccacagggagggggcatcttaatatatctctgatcatgccatc

SEQ ID NO: 381 - RNA, 100 nt, synthetic construct
  source 1..100: mol_type = other RNA
gatattgtgacatatctctgcactcatcacacaaatcagtaaaatcttctataggatccacagggagggggcattttaatatatctctgacaaccccatc

SEQ ID NO: 382 - RNA, 100 nt, synthetic construct
  source 1..100: mol_type = other RNA
gatattgtgacatatctctgcactcatcacacaacattttcaaatcttctataggatccacagggagggggcattttaacatatctctgatacctgcatc

SEQ ID NO: 383 - RNA, 100 nt, synthetic construct
  source 1..100: mol_type = other RNA
gatattgtgacatatctctgcactcatcacacaacaccttcaaatcttctataggatccacagggagggggcatttcaatatatctctgacagtcgcatc

SEQ ID NO: 384 - RNA, 100 nt, synthetic construct
  source 1..100: mol_type = other RNA
gatattgtgacatatctctgcactcatcacacaaccaaaacaaatcttctataggatccacagggagggggcattctaatatatctctgattcttccatc

SEQ ID NO: 385 - RNA, 100 nt, synthetic construct
  source 1..100: mol_type = other RNA
gatattgtgacatatctctgcactcatcacacaattcaaccaaatcttctataggatccacagggagggggcatcttaatatatctctgacggacacatc

SEQ ID NO: 386 - RNA, 100 nt, synthetic construct
  source 1..100: mol_type = other RNA
gatattgtgacatatctctgcactcatcacacaataatcccaaatcttctataggatccacagggagggggcattttaatatatctctgattcggacatc

SEQ ID NO: 387 - RNA, 100 nt, synthetic construct
  source 1..100: mol_type = other RNA
gatattgtgacatatctctgcactcatcacacattccccgcaaatcttctataggatccacagggagggggcattttaacatatctctgataagtccatc

SEQ ID NO: 388 - RNA, 100 nt, synthetic construct
  source 1..100: mol_type = other RNA
gatattgtgacatatctctgcactcatcacacatcgtgcgcaaatcttctataggatccacagggagggggcatttcaatatatctctgacagaggcatc

SEQ ID NO: 389 - RNA, 100 nt, synthetic construct
  source 1..100: mol_type = other RNA
gatattgtgacatatctctgcactcatcacacatagtaagcaaatcttctataggatccacagggagggggcatcttaatatatctctgattcaaacatc

SEQ ID NO: 390 - RNA, 100 nt, synthetic construct
  source 1..100: mol_type = other RNA
gatattgtgacatatctctgcactcatcacacattgtcggcaaatcttctataggatccacagggagggggcattttaatatatctctgatcacggcatc

SEQ ID NO: 391 - RNA, 100 nt, synthetic construct
  source 1..100: mol_type = other RNA
gatattgtgacatatctctgcactcatcacactccttttgcaaatcttctataggatccacagggagggggcattttaacatatctctgacgaccgcatc

SEQ ID NO: 392 - RNA, 100 nt, synthetic construct
  source 1..100: mol_type = other RNA
gatattgtgacatatctctgcactcatcacacccactttgcaaatcttctataggatccacagggagggggcatttcaatatatctctgattcatacatc

SEQ ID NO: 393 - RNA, 100 nt, synthetic construct
  source 1..100: mol_type = other RNA
gatattgtgacatatctctgcactcatcacactccctctgcaaatcttctataggatccacagggagggggcattctaatatatctctgaccctcgcatc

SEQ ID NO: 394 - RNA, 100 nt, synthetic construct
  source 1..100: mol_type = other RNA
gatattgtgacatatctctgcactcatcacacttcacctgcaaatcttctataggatccacagggagggggcatcttaatatatctctgatagcaccatc

SEQ ID NO: 395 - RNA, 100 nt, synthetic construct
  source 1..100: mol_type = other RNA
gatattgtgacatatctctgcactcatcacactatcattgcaaatcttctataggatccacagggagggggcattttaatatatctctgatgcatacatc

SEQ ID NO: 396 - RNA, 100 nt, synthetic construct
  source 1..100: mol_type = other RNA
gatattgtgacatatctctgcactcatcacagtccatatgcaaatcttctataggatccacagggagggggcattttaacatatctctgatgcatacatc

SEQ ID NO: 397 - RNA, 100 nt, synthetic construct
  source 1..100: mol_type = other RNA
gatattgtgacatatctctgcactcatcacaaatcccatgcaaatcttctataggatccacagggagggggcattctaatatatctctgaccatgccatc

SEQ ID NO: 398 - RNA, 100 nt, synthetic construct
  source 1..100: mol_type = other RNA
gatattgtgacatatctctgcactcatcacaagcattatgcaaatcttctataggatccacagggagggggcatcttaatatatctctgatgcagccatc

SEQ ID NO: 399 - RNA, 100 nt, synthetic construct
  source 1..100: mol_type = other RNA
gatattgtgacatatctctgcactcatcacaaccccaatgcaaatcttctataggatccacagggagggggcattttaatatatctctgacatcggcatc

SEQ ID NO: 400 - RNA, 100 nt, synthetic construct
  source 1..100: mol_type = other RNA
gatattgtgacatatctctgcactcatcactaacctgatgcaaatcttctataggatccacagggagggggcattttaacatatctctgaccaaagcatc

SEQ ID NO: 401 - RNA, 100 nt, synthetic construct
  source 1..100: mol_type = other RNA
gatattgtgacatatctctgcactcatcacctggtcgatgcaaatcttctataggatccacagggagggggcatttcaatatatctctgataagcccatc

SEQ ID NO: 402 - RNA, 100 nt, synthetic construct
  source 1..100: mol_type = other RNA
gatattgtgacatatctctgcactcatcacctctttgatgcaaatcttctataggatccacagggagggggcattctaatatatctctgaccaacccatc

SEQ ID NO: 403 - RNA, 100 nt, synthetic construct
  source 1..100: mol_type = other RNA
gatattgtgacatatctctgcactcatcacctctacgatgcaaatcttctataggatccacagggagggggcatcttaatatatctctgacggccccatc

SEQ ID NO: 404 - RNA, 100 nt, synthetic construct
  source 1..100: mol_type = other RNA
gatattgtgacatatctctgcactcatcacttgtgtgatgcaaatcttctataggatccacagggagggggcattttaatatatctctgacattcccatc

SEQ ID NO: 405 - RNA, 100 nt, synthetic construct
  source 1..100: mol_type = other RNA
gatattgtgacatatctctgcactcatcacacaaaagatgcaaatcttctatagtgcggtcagggagggggcattttaacatatctctgttgatttcatc

SEQ ID NO: 406 - RNA, 100 nt, synthetic construct
  source 1..100: mol_type = other RNA
gatattgtgacatatctctgcactcatcacacaaaagatgcaaatcttctatagtacaatcagggagggggcatttcaatatatctctgctttcctcatc

SEQ ID NO: 407 - RNA, 100 nt, synthetic construct
  source 1..100: mol_type = other RNA
gatattgtgacatatctctgcactcatcacacaaaagatgcaaatcttctatagtcatatcagggagggggcattctaatatatctctgtcgggttcatc

SEQ ID NO: 408 - RNA, 100 nt, synthetic construct
  source 1..100: mol_type = other RNA
gatattgtgacatatctctgcactcatcacacaaaagatgcaaatcttctatagactaatcagggagggggcatcttaatatatctctgcgtacctcatc

SEQ ID NO: 409 - RNA, 100 nt, synthetic construct
  source 1..100: mol_type = other RNA
gatattgtgacatatctctgcactcatcacacaaaagatgcaaatcttctatagaacaatcagggagggggcattttaatatatctctgcaagattcatc

SEQ ID NO: 410 - RNA, 100 nt, synthetic construct
  source 1..100: mol_type = other RNA
gatattgtgacatatctctgcactcatcacacaaaagatgcaaatcttctatacatgaaacagggagggggcattttaacatatctctgtgttcctcatc

SEQ ID NO: 411 - RNA, 100 nt, synthetic construct
  source 1..100: mol_type = other RNA
gatattgtgacatatctctgcactcatcacacaaaagatgcaaatcttctatatctgcaacagggagggggcatttcaatatatctctgtttgtttcatc

SEQ ID NO: 412 - RNA, 100 nt, synthetic construct
  source 1..100: mol_type = other RNA
gatattgtgacatatctctgcactcatcacacaaaagatgcaaatcttctatacccaagacagggagggggcattctaatatatctctgttaacctcatc

SEQ ID NO: 413 - RNA, 100 nt, synthetic construct
  source 1..100: mol_type = other RNA
gatattgtgacatatctctgcactcatcacacaaaagatgcaaatcttctataattgagacagggagggggcatcttaatatatctctgtcagtctcatc

SEQ ID NO: 414 - RNA, 100 nt, synthetic construct
  source 1..100: mol_type = other RNA
gatattgtgacatatctctgcactcatcacacaaaagatgcaaatcttctatcgctagcacagggagggggcattttaacatatctctgtgagtttcatc

SEQ ID NO: 415 - RNA, 100 nt, synthetic construct
  source 1..100: mol_type = other RNA
gatattgtgacatatctctgcactcatcacacaaaagatgcaaatcttctatttccaacacagggagggggcatttcaatatatctctgttgggctcatc

SEQ ID NO: 416 - RNA, 100 nt, synthetic construct
  source 1..100: mol_type = other RNA
gatattgtgacatatctctgcactcatcacacaaaagatgcaaatcttctattaaaagcacagggagggggcattctaatatatctctgtgagactcatc

SEQ ID NO: 417 - RNA, 100 nt, synthetic construct
  source 1..100: mol_type = other RNA
gatattgtgacatatctctgcactcatcacacaaaagatgcaaatcttctatcccgaacacagggagggggcatcttaatatatctctgcgtatttcatc

SEQ ID NO: 418 - RNA, 100 nt, synthetic construct
  source 1..100: mol_type = other RNA
gatattgtgacatatctctgcactcatcacacaaaagatgcaaatcttctatcatgcgcacagggagggggcattttaatatatctctgcgggattcatc

SEQ ID NO: 419 - RNA, 100 nt, synthetic construct
  source 1..100: mol_type = other RNA
gatattgtgacatatctctgcactcatcacacaaaagatgcaaatcttctaccctggccacagggagggggcattttaacatatctctgcccacctcatc

SEQ ID NO: 420 - RNA, 100 nt, synthetic construct
  source 1..100: mol_type = other RNA
gatattgtgacatatctctgcactcatcacacaaaagatgcaaatcttctaaaatccccacagggagggggcatttcaatatatctctgtcccgctcatc

SEQ ID NO: 421 - RNA, 100 nt, synthetic construct
  source 1..100: mol_type = other RNA
gatattgtgacatatctctgcactcatcacacaaaagatgcaaatcttctactcatgccacagggagggggcattctaatatatctctgttaagttcatc

SEQ ID NO: 422 - RNA, 100 nt, synthetic construct
  source 1..100: mol_type = other RNA
gatattgtgacatatctctgcactcatcacacaaaagatgcaaatcttctaattatgccacagggagggggcatcttaatatatctctgtgtctttcatc

SEQ ID NO: 423 - RNA, 100 nt, synthetic construct
  source 1..100: mol_type = other RNA
gatattgtgacatatctctgcactcatcacacaaaagatgcaaatcttctaggcctcccacagggagggggcattttaatatatctctgccaccttcatc

SEQ ID NO: 424 - RNA, 100 nt, synthetic construct
  source 1..100: mol_type = other RNA
gatattgtgacatatctctgcactcatcacacaaaagatgcaaatcttcttcatcctccacagggagggggcattttaacatatctctgttacactcatc

SEQ ID NO: 425 - RNA, 100 nt, synthetic construct
  source 1..100: mol_type = other RNA
gatattgtgacatatctctgcactcatcacacaaaagatgcaaatcttctccgttttccacagggagggggcatttcaatatatctctgttgccttcatc

SEQ ID NO: 426 - RNA, 100 nt, synthetic construct
  source 1..100: mol_type = other RNA
gatattgtgacatatctctgcactcatcacacaaaagatgcaaatcttcttgccgttccacagggagggggcattctaatatatctctgcggaactcatc

SEQ ID NO: 427 - RNA, 100 nt, synthetic construct
  source 1..100: mol_type = other RNA
gatattgtgacatatctctgcactcatcacacaaaagatgcaaatcttcttccaattccacagggagggggcatcttaatatatctctgcgatcctcatc

SEQ ID NO: 428 - RNA, 100 nt, synthetic construct
  source 1..100: mol_type = other RNA
gatattgtgacatatctctgcactcatcacacaaaagatgcaaatcttctcatttttccacagggagggggcattttaatatatctctgtgtcgttcatc

SEQ ID NO: 429 - RNA, 100 nt, synthetic construct
  source 1..100: mol_type = other RNA
gatattgtgacatatctctgcactcatcacacaaaagatgcaaatcttcgccgcaatccacagggagggggcattttaacatatctctgtcggactcatc

SEQ ID NO: 430 - RNA, 100 nt, synthetic construct
  source 1..100: mol_type = other RNA
gatattgtgacatatctctgcactcatcacacaaaagatgcaaatcttcagctatatccacagggagggggcatttcaatatatctctgccaaattcatc

SEQ ID NO: 431 - RNA, 100 nt, synthetic construct
  source 1..100: mol_type = other RNA
gatattgtgacatatctctgcactcatcacacaaaagatgcaaatcttcgaaactatccacagggagggggcattctaatatatctctgctggtttcatc

SEQ ID NO: 432 - RNA, 100 nt, synthetic construct
  source 1..100: mol_type = other RNA
gatattgtgacatatctctgcactcatcacacaaaagatgcaaatcttccgattcatccacagggagggggcatcttaatatatctctgtcaatctcatc

SEQ ID NO: 433 - RNA, 100 nt, synthetic construct
  source 1..100: mol_type = other RNA
gatattgtgacatatctctgcactcatcacacaaaagatgcaaatcttgcctcagatccacagggagggggcattttaacatatctctgttggattcatc

SEQ ID NO: 434 - RNA, 100 nt, synthetic construct
  source 1..100: mol_type = other RNA
gatattgtgacatatctctgcactcatcacacaaaagatgcaaatcttaaagctgatccacagggagggggcatttcaatatatctctgtcgtcctcatc

SEQ ID NO: 435 - RNA, 100 nt, synthetic construct
  source 1..100: mol_type = other RNA
gatattgtgacatatctctgcactcatcacacaaaagatgcaaatcttaccgaagatccacagggagggggcattctaatatatctctgccgtcttcatc

SEQ ID NO: 436 - RNA, 100 nt, synthetic construct
  source 1..100: mol_type = other RNA
gatattgtgacatatctctgcactcatcacacaaaagatgcaaatcttatcctcgatccacagggagggggcatcttaatatatctctgtcaagttcatc

SEQ ID NO: 437 - RNA, 100 nt, synthetic construct
  source 1..100: mol_type = other RNA
gatattgtgacatatctctgcactcatcacacaaaagatgcaaatcttagtgcagatccacagggagggggcattttaatatatctctgcggatctcatc

SEQ ID NO: 438 - RNA, 100 nt, synthetic construct
  source 1..100: mol_type = other RNA
gatattgtgacatatctctgcactcatcacacaaaagatgcaaatctaaccccggatccacagggagggggcattttaacatatctctgcctcgctcatc

SEQ ID NO: 439 - RNA, 100 nt, synthetic construct
  source 1..100: mol_type = other RNA
gatattgtgacatatctctgcactcatcacacaaaagatgcaaatctgggagcggatccacagggagggggcatttcaatatatctctgttacattcatc

SEQ ID NO: 440 - RNA, 100 nt, synthetic construct
  source 1..100: mol_type = other RNA
gatattgtgacatatctctgcactcatcacacaaaagatgcaaatctcacgatggatccacagggagggggcattctaatatatctctgtgagcctcatc

SEQ ID NO: 441 - RNA, 100 nt, synthetic construct
  source 1..100: mol_type = other RNA
gatattgtgacatatctctgcactcatcacacaaaagatgcaaatctcatcctggatccacagggagggggcattttaatatatctctgcgtatctcatc

SEQ ID NO: 442 - RNA, 100 nt, synthetic construct
  source 1..100: mol_type = other RNA
gatattgtgacatatctctgcactcatcacacaaaagatgcaaatcaatacaaggatccacagggagggggcattttaacatatctctgcggatctcatc

SEQ ID NO: 443 - RNA, 100 nt, synthetic construct
  source 1..100: mol_type = other RNA
gatattgtgacatatctctgcactcatcacacaaaagatgcaaatcggagagaggatccacagggagggggcatttcaatatatctctgccaggctcatc

SEQ ID NO: 444 - RNA, 100 nt, synthetic construct
  source 1..100: mol_type = other RNA
gatattgtgacatatctctgcactcatcacacaaaagatgcaaatccggcgcaggatccacagggagggggcattctaatatatctctgcagatttcatc

SEQ ID NO: 445 - RNA, 100 nt, synthetic construct
  source 1..100: mol_type = other RNA
gatattgtgacatatctctgcactcatcacacaaaagatgcaaatcgcgcaaaggatccacagggagggggcatcttaatatatctctgtaaagctcatc

SEQ ID NO: 446 - RNA, 100 nt, synthetic construct
  source 1..100: mol_type = other RNA
gatattgtgacatatctctgcactcatcacacaaaagatgcaaatcgtggtgaggatccacagggagggggcattttaatatatctctgccgagctcatc

SEQ ID NO: 447 - RNA, 100 nt, synthetic construct
  source 1..100: mol_type = other RNA
gatattgtgacatatctctgcactcatcacacaaaagatgcaaatgcattttaggatccacagggagggggcattttaacatatctctgttaaactcatc

SEQ ID NO: 448 - RNA, 100 nt, synthetic construct
  source 1..100: mol_type = other RNA
gatattgtgacatatctctgcactcatcacacaaaagatgcaaatgggaattaggatccacagggagggggcatttcaatatatctctgtgaacctcatc

SEQ ID NO: 449 - RNA, 100 nt, synthetic construct
  source 1..100: mol_type = other RNA
gatattgtgacatatctctgcactcatcacacaaaagatgcaaatgctaattaggatccacagggagggggcattctaatatatctctgtcaccctcatc

SEQ ID NO: 450 - RNA, 100 nt, synthetic construct
  source 1..100: mol_type = other RNA
gatattgtgacatatctctgcactcatcacacaaaagatgcaaatatggattaggatccacagggagggggcatcttaatatatctctgccggtttcatc

SEQ ID NO: 451 - RNA, 100 nt, synthetic construct
  source 1..100: mol_type = other RNA
gatattgtgacatatctctgcactcatcacacaaaagatgcaaataatacctaggatccacagggagggggcattttaatatatctctgtttatctcatc

SEQ ID NO: 452 - RNA, 100 nt, synthetic construct
  source 1..100: mol_type = other RNA
gatattgtgacatatctctgcactcatcacacaaaagatgcaaacagcacataggatccacagggagggggcattttaacatatctctgctggattcatc

SEQ ID NO: 453 - RNA, 100 nt, synthetic construct
  source 1..100: mol_type = other RNA
gatattgtgacatatctctgcactcatcacacaaaagatgcaaaacaaacataggatccacagggagggggcatttcaatatatctctgcccccttcatc

SEQ ID NO: 454 - RNA, 100 nt, synthetic construct
  source 1..100: mol_type = other RNA
gatattgtgacatatctctgcactcatcacacaaaagatgcaaaagaggcataggatccacagggagggggcattctaatatatctctgcttgcctcatc

SEQ ID NO: 455 - RNA, 100 nt, synthetic construct
  source 1..100: mol_type = other RNA
gatattgtgacatatctctgcactcatcacacaaaagatgcaaacacggcataggatccacagggagggggcatcttaatatatctctgtcggtttcatc

SEQ ID NO: 456 - RNA, 100 nt, synthetic construct
  source 1..100: mol_type = other RNA
gatattgtgacatatctctgcactcatcacacaaaagatgcaaaattagaataggatccacagggagggggcattttaatatatctctgttgcattcatc

SEQ ID NO: 457 - RNA, 100 nt, synthetic construct
  source 1..100: mol_type = other RNA
gatattgtgacatatctctgcactcatcacacaaaagatgcaataagcgtataggatccacagggagggggcattttaacatatctctgcccatctcatc

SEQ ID NO: 458 - RNA, 100 nt, synthetic construct
  source 1..100: mol_type = other RNA
gatattgtgacatatctctgcactcatcacacaaaagatgcaacatacatataggatccacagggagggggcatttcaatatatctctgcgtgattcatc

SEQ ID NO: 459 - RNA, 100 nt, synthetic construct
  source 1..100: mol_type = other RNA
gatattgtgacatatctctgcactcatcacacaaaagatgcaatgtaagtataggatccacagggagggggcattctaatatatctctgtcatcttcatc

SEQ ID NO: 460 - RNA, 100 nt, synthetic construct
  source 1..100: mol_type = other RNA
gatattgtgacatatctctgcactcatcacacaaaagatgcaactaaagtataggatccacagggagggggcatcttaatatatctctgtaaagctcatc

SEQ ID NO: 461 - RNA, 100 nt, synthetic construct
  source 1..100: mol_type = other RNA
gatattgtgacatatctctgcactcatcacacaaaagatgcaattgctatataggatccacagggagggggcattttaatatatctctgtttacctcatc

SEQ ID NO: 462 - RNA, 100 nt, synthetic construct
  source 1..100: mol_type = other RNA
gatattgtgacatatctctgcactcatcacacaaaagatgcaccataactataggatccacagggagggggcattttaacatatctctgtcaagttcatc

SEQ ID NO: 463 - RNA, 100 nt, synthetic construct
  source 1..100: mol_type = other RNA
gatattgtgacatatctctgcactcatcacacaaaagatgcatctaagctataggatccacagggagggggcatttcaatatatctctgcccccttcatc

SEQ ID NO: 464 - RNA, 100 nt, synthetic construct
  source 1..100: mol_type = other RNA
gatattgtgacatatctctgcactcatcacacaaaagatgcatcgaacctataggatccacagggagggggcattctaatatatctctgccccattcatc

SEQ ID NO: 465 - RNA, 100 nt, synthetic construct
  source 1..100: mol_type = other RNA
gatattgtgacatatctctgcactcatcacacaaaagatgcacgaaacctataggatccacagggagggggcatcttaatatatctctgttggcctcatc

SEQ ID NO: 466 - RNA, 100 nt, synthetic construct
  source 1..100: mol_type = other RNA
gatattgtgacatatctctgcactcatcacacaaaagatgcatcagggctataggatccacagggagggggcattttaatatatctctgctggattcatc

SEQ ID NO: 467 - RNA, 100 nt, synthetic construct
  source 1..100: mol_type = other RNA
gatattgtgacatatctctgcactcatcacacaaaagatgccagaggtctataggatccacagggagggggcattttaacatatctctgttgagttcatc

SEQ ID NO: 468 - RNA, 100 nt, synthetic construct
  source 1..100: mol_type = other RNA
gatattgtgacatatctctgcactcatcacacaaaagatgcttcggctctataggatccacagggagggggcatttcaatatatctctgcgggtctcatc

SEQ ID NO: 469 - RNA, 100 nt, synthetic construct
  source 1..100: mol_type = other RNA
gatattgtgacatatctctgcactcatcacacaaaagatgcccactgtctataggatccacagggagggggcattctaatatatctctgctggtttcatc

SEQ ID NO: 470 - RNA, 100 nt, synthetic construct
  source 1..100: mol_type = other RNA
gatattgtgacatatctctgcactcatcacacaaaagatgcttaacgtctataggatccacagggagggggcatcttaatatatctctgtcagtctcatc

SEQ ID NO: 471 - RNA, 100 nt, synthetic construct
  source 1..100: mol_type = other RNA
gatattgtgacatatctctgcactcatcacacaaaagatgcccacagtctataggatccacagggagggggcattttaatatatctctgcgaatttcatc

SEQ ID NO: 472 - RNA, 100 nt, synthetic construct
  source 1..100: mol_type = other RNA
gatattgtgacatatctctgcactcatcacacaaaagatggttgtattctataggatccacagggagggggcattttaacatatctctgtttctctcatc

SEQ ID NO: 473 - RNA, 100 nt, synthetic construct
  source 1..100: mol_type = other RNA
gatattgtgacatatctctgcactcatcacacaaaagatgactgcgttctataggatccacagggagggggcatttcaatatatctctgttacactcatc

SEQ ID NO: 474 - RNA, 100 nt, synthetic construct
  source 1..100: mol_type = other RNA
gatattgtgacatatctctgcactcatcacacaaaagatggccaggttctataggatccacagggagggggcattctaatatatctctgtgatcctcatc

SEQ ID NO: 475 - RNA, 100 nt, synthetic construct
  source 1..100: mol_type = other RNA
gatattgtgacatatctctgcactcatcacacaaaagatgagtcaattctataggatccacagggagggggcatcttaatatatctctgcttatctcatc

SEQ ID NO: 476 - RNA, 100 nt, synthetic construct
  source 1..100: mol_type = other RNA
gatattgtgacatatctctgcactcatcacacaaaagatggcgcagttctataggatccacagggagggggcattttaatatatctctgtccatctcatc

SEQ ID NO: 477 - RNA, 100 nt, synthetic construct
  source 1..100: mol_type = other RNA
gatattgtgacatatctctgcactcatcacacaaaagattagtcacttctataggatccacagggagggggcattttaacatatctctgttggtttcatc

SEQ ID NO: 478 - RNA, 100 nt, synthetic construct
  source 1..100: mol_type = other RNA
gatattgtgacatatctctgcactcatcacacaaaagatatgttccttctataggatccacagggagggggcatttcaatatatctctgtcaaattcatc

SEQ ID NO: 479 - RNA, 100 nt, synthetic construct
  source 1..100: mol_type = other RNA
gatattgtgacatatctctgcactcatcacacaaaagattaacggcttctataggatccacagggagggggcattctaatatatctctgcggatctcatc

SEQ ID NO: 480 - RNA, 100 nt, synthetic construct
  source 1..100: mol_type = other RNA
gatattgtgacatatctctgcactcatcacacaaaagattttcaccttctataggatccacagggagggggcatcttaatatatctctgtaaggttcatc

SEQ ID NO: 481 - RNA, 100 nt, synthetic construct
  source 1..100: mol_type = other RNA
gatattgtgacatatctctgcactcatcacacaaaagataaatagcttctataggatccacagggagggggcattttaatatatctctgtttatttcatc

SEQ ID NO: 482 - RNA, 100 nt, synthetic construct
  source 1..100: mol_type = other RNA
gatattgtgacatatctctgcactcatcacacaaaagaatttattcttctataggatccacagggagggggcattttaacatatctctgcccacctcatc

SEQ ID NO: 483 - RNA, 100 nt, synthetic construct
  source 1..100: mol_type = other RNA
gatattgtgacatatctctgcactcatcacacaaaagagtccgctcttctataggatccacagggagggggcatttcaatatatctctgttggtctcatc

SEQ ID NO: 484 - RNA, 100 nt, synthetic construct
  source 1..100: mol_type = other RNA
gatattgtgacatatctctgcactcatcacacaaaagaacatgttcttctataggatccacagggagggggcattctaatatatctctgtatatctcatc

SEQ ID NO: 485 - RNA, 100 nt, synthetic construct
  source 1..100: mol_type = other RNA
gatattgtgacatatctctgcactcatcacacaaaagacccctttcttctataggatccacagggagggggcatcttaatatatctctgcgaagttcatc

SEQ ID NO: 486 - RNA, 100 nt, synthetic construct
  source 1..100: mol_type = other RNA
gatattgtgacatatctctgcactcatcacacaaaagaaagtcttcttctataggatccacagggagggggcattttaatatatctctgtagggctcatc

SEQ ID NO: 487 - RNA, 100 nt, synthetic construct
  source 1..100: mol_type = other RNA
gatattgtgacatatctctgcactcatcacacaaaagtatagtatcttctataggatccacagggagggggcattttaacatatctctgttgccctcatc

SEQ ID NO: 488 - RNA, 100 nt, synthetic construct
  source 1..100: mol_type = other RNA
gatattgtgacatatctctgcactcatcacacaaaagtactacatcttctataggatccacagggagggggcatttcaatatatctctgtgtgtttcatc

SEQ ID NO: 489 - RNA, 100 nt, synthetic construct
  source 1..100: mol_type = other RNA
gatattgtgacatatctctgcactcatcacacaaaagcgattcatcttctataggatccacagggagggggcattctaatatatctctgcccccttcatc

SEQ ID NO: 490 - RNA, 100 nt, synthetic construct
  source 1..100: mol_type = other RNA
gatattgtgacatatctctgcactcatcacacaaaagcaaatcatcttctataggatccacagggagggggcatcttaatatatctctgccaaactcatc

SEQ ID NO: 491 - RNA, 100 nt, synthetic construct
  source 1..100: mol_type = other RNA
gatattgtgacatatctctgcactcatcacacaaaagtaaaatatcttctataggatccacagggagggggcattttaatatatctctgttatcctcatc

SEQ ID NO: 492 - RNA, 100 nt, synthetic construct
  source 1..100: mol_type = other RNA
gatattgtgacatatctctgcactcatcacacaaaactccacaatcttctataggatccacagggagggggcattttaacatatctctgtatctctcatc

SEQ ID NO: 493 - RNA, 100 nt, synthetic construct
  source 1..100: mol_type = other RNA
gatattgtgacatatctctgcactcatcacacaaaactaactaatcttctataggatccacagggagggggcatttcaatatatctctgttgcattcatc

SEQ ID NO: 494 - RNA, 100 nt, synthetic construct
  source 1..100: mol_type = other RNA
gatattgtgacatatctctgcactcatcacacaaaaccacttaatcttctataggatccacagggagggggcattctaatatatctctgccagtttcatc

SEQ ID NO: 495 - RNA, 100 nt, synthetic construct
  source 1..100: mol_type = other RNA
gatattgtgacatatctctgcactcatcacacaaaatactataatcttctataggatccacagggagggggcatcttaatatatctctgttgtcttcatc

SEQ ID NO: 496 - RNA, 100 nt, synthetic construct
  source 1..100: mol_type = other RNA
gatattgtgacatatctctgcactcatcacacaaaaatcaacaatcttctataggatccacagggagggggcattttaatatatctctgtcttcctcatc

SEQ ID NO: 497 - RNA, 100 nt, synthetic construct
  source 1..100: mol_type = other RNA
gatattgtgacatatctctgcactcatcacacaaactagtaaaatcttctataggatccacagggagggggcattttaacatatctctgccgtcttcatc

SEQ ID NO: 498 - RNA, 100 nt, synthetic construct
  source 1..100: mol_type = other RNA
gatattgtgacatatctctgcactcatcacacaaacttcagaaatcttctataggatccacagggagggggcatttcaatatatctctgtttctctcatc

SEQ ID NO: 499 - RNA, 100 nt, synthetic construct
  source 1..100: mol_type = other RNA
gatattgtgacatatctctgcactcatcacacaaatttggaaaatcttctataggatccacagggagggggcattctaatatatctctgcttagttcatc

SEQ ID NO: 500 - RNA, 100 nt, synthetic construct
  source 1..100: mol_type = other RNA
gatattgtgacatatctctgcactcatcacacaaacaccaaaaatcttctataggatccacagggagggggcatcttaatatatctctgtttgtctcatc

SEQ ID NO: 501 - RNA, 100 nt, synthetic construct
  source 1..100: mol_type = other RNA
gatattgtgacatatctctgcactcatcacacaaattcttaaaatcttctataggatccacagggagggggcattttaatatatctctgccagtctcatc

SEQ ID NO: 502 - RNA, 100 nt, synthetic construct
  source 1..100: mol_type = other RNA
gatattgtgacatatctctgcactcatcacacaacctacacaaatcttctataggatccacagggagggggcattttaacatatctctgttgcactcatc

SEQ ID NO: 503 - RNA, 100 nt, synthetic construct
  source 1..100: mol_type = other RNA
gatattgtgacatatctctgcactcatcacacaacgaaatcaaatcttctataggatccacagggagggggcatttcaatatatctctgccaccttcatc

SEQ ID NO: 504 - RNA, 100 nt, synthetic construct
  source 1..100: mol_type = other RNA
gatattgtgacatatctctgcactcatcacacaatacactcaaatcttctataggatccacagggagggggcattctaatatatctctgccaatctcatc

SEQ ID NO: 505 - RNA, 100 nt, synthetic construct
  source 1..100: mol_type = other RNA
gatattgtgacatatctctgcactcatcacacaatttagccaaatcttctataggatccacagggagggggcatcttaatatatctctgcaggactcatc

SEQ ID NO: 506 - RNA, 100 nt, synthetic construct
  source 1..100: mol_type = other RNA
gatattgtgacatatctctgcactcatcacacaacgaaaccaaatcttctataggatccacagggagggggcattttaatatatctctgtttacctcatc

SEQ ID NO: 507 - RNA, 100 nt, synthetic construct
  source 1..100: mol_type = other RNA
gatattgtgacatatctctgcactcatcacacatttccagcaaatcttctataggatccacagggagggggcattttaacatatctctgcttatttcatc

SEQ ID NO: 508 - RNA, 100 nt, synthetic construct
  source 1..100: mol_type = other RNA
gatattgtgacatatctctgcactcatcacacacacgtggcaaatcttctataggatccacagggagggggcatttcaatatatctctgcggggttcatc

SEQ ID NO: 509 - RNA, 100 nt, synthetic construct
  source 1..100: mol_type = other RNA
gatattgtgacatatctctgcactcatcacacaccacacgcaaatcttctataggatccacagggagggggcattctaatatatctctgttttcctcatc

SEQ ID NO: 510 - RNA, 100 nt, synthetic construct
  source 1..100: mol_type = other RNA
gatattgtgacatatctctgcactcatcacacacctttcgcaaatcttctataggatccacagggagggggcatcttaatatatctctgtcatcttcatc

SEQ ID NO: 511 - RNA, 100 nt, synthetic construct
  source 1..100: mol_type = other RNA
gatattgtgacatatctctgcactcatcacacatcgccggcaaatcttctataggatccacagggagggggcattttaatatatctctgcccccctcatc

SEQ ID NO: 512 - RNA, 100 nt, synthetic construct
  source 1..100: mol_type = other RNA
gatattgtgacatatctctgcactcatcacactacgcctgcaaatcttctataggatccacagggagggggcattttaacatatctctgttacattcatc

SEQ ID NO: 513 - RNA, 100 nt, synthetic construct
  source 1..100: mol_type = other RNA
gatattgtgacatatctctgcactcatcacaccctgtctgcaaatcttctataggatccacagggagggggcatttcaatatatctctgtccacttcatc

SEQ ID NO: 514 - RNA, 100 nt, synthetic construct
  source 1..100: mol_type = other RNA
gatattgtgacatatctctgcactcatcacactccatttgcaaatcttctataggatccacagggagggggcattctaatatatctctgtctcgctcatc

SEQ ID NO: 515 - RNA, 100 nt, synthetic construct
  source 1..100: mol_type = other RNA
gatattgtgacatatctctgcactcatcacactccatctgcaaatcttctataggatccacagggagggggcatcttaatatatctctgtgtatttcatc

SEQ ID NO: 516 - RNA, 100 nt, synthetic construct
  source 1..100: mol_type = other RNA
gatattgtgacatatctctgcactcatcacactgtccctgcaaatcttctataggatccacagggagggggcattttaatatatctctgccagtctcatc

SEQ ID NO: 517 - RNA, 100 nt, synthetic construct
  source 1..100: mol_type = other RNA
gatattgtgacatatctctgcactcatcacaatcgctatgcaaatcttctataggatccacagggagggggcattttaacatatctctgcctcactcatc

SEQ ID NO: 518 - RNA, 100 nt, synthetic construct
  source 1..100: mol_type = other RNA
gatattgtgacatatctctgcactcatcacaagccaaatgcaaatcttctataggatccacagggagggggcatttcaatatatctctgccgtcctcatc

SEQ ID NO: 519 - RNA, 100 nt, synthetic construct
  source 1..100: mol_type = other RNA
gatattgtgacatatctctgcactcatcacagttctcatgcaaatcttctataggatccacagggagggggcattctaatatatctctgtttctttcatc

SEQ ID NO: 520 - RNA, 100 nt, synthetic construct
  source 1..100: mol_type = other RNA
gatattgtgacatatctctgcactcatcacagctcatatgcaaatcttctataggatccacagggagggggcatcttaatatatctctgcttctctcatc

SEQ ID NO: 521 - RNA, 100 nt, synthetic construct
  source 1..100: mol_type = other RNA
gatattgtgacatatctctgcactcatcacaaagtttatgcaaatcttctataggatccacagggagggggcattttaatatatctctgtcgagttcatc

SEQ ID NO: 522 - RNA, 100 nt, synthetic construct
  source 1..100: mol_type = other RNA
gatattgtgacatatctctgcactcatcactggcatgatgcaaatcttctataggatccacagggagggggcattttaacatatctctgcgaggttcatc

SEQ ID NO: 523 - RNA, 100 nt, synthetic construct
  source 1..100: mol_type = other RNA
gatattgtgacatatctctgcactcatcactgtcttgatgcaaatcttctataggatccacagggagggggcatttcaatatatctctgcctctttcatc

SEQ ID NO: 524 - RNA, 100 nt, synthetic construct
  source 1..100: mol_type = other RNA
gatattgtgacatatctctgcactcatcacccctccgatgcaaatcttctataggatccacagggagggggcattctaatatatctctgcgtacctcatc

SEQ ID NO: 525 - RNA, 100 nt, synthetic construct
  source 1..100: mol_type = other RNA
gatattgtgacatatctctgcactcatcactgcctcgatgcaaatcttctataggatccacagggagggggcatcttaatatatctctgttggtttcatc

SEQ ID NO: 526 - RNA, 100 nt, synthetic construct
  source 1..100: mol_type = other RNA
gatattgtgacatatctctgcactcatcaccttgccgatgcaaatcttctataggatccacagggagggggcattttaatatatctctgcggatctcatc

SEQ ID NO: 527 - RNA, 100 nt, synthetic construct
  source 1..100: mol_type = other RNA
gatattgtgacatatctctgcactcatcacacaaaagatgcaaatcttctatagactattcagggagggggcattttaacatatctctttttgcatcatc

SEQ ID NO: 528 - RNA, 100 nt, synthetic construct
  source 1..100: mol_type = other RNA
gatattgtgacatatctctgcactcatcacacaaaagatgcaaatcttctatagcgctttcagggagggggcatttcaatatatctcttccgatatcatc

SEQ ID NO: 529 - RNA, 100 nt, synthetic construct
  source 1..100: mol_type = other RNA
gatattgtgacatatctctgcactcatcacacaaaagatgcaaatcttctatagaaggatcagggagggggcattctaatatatctctatgtatatcatc

SEQ ID NO: 530 - RNA, 100 nt, synthetic construct
  source 1..100: mol_type = other RNA
gatattgtgacatatctctgcactcatcacacaaaagatgcaaatcttctatagtcgggtcagggagggggcatcttaatatatctctacgtccatcatc

SEQ ID NO: 531 - RNA, 100 nt, synthetic construct
  source 1..100: mol_type = other RNA
gatattgtgacatatctctgcactcatcacacaaaagatgcaaatcttctatagtactttcagggagggggcattttaatatatctctttcaccatcatc

SEQ ID NO: 532 - RNA, 100 nt, synthetic construct
  source 1..100: mol_type = other RNA
gatattgtgacatatctctgcactcatcacacaaaagatgcaaatcttctatatagaaaacagggagggggcattttaacatatctcttatggtatcatc

SEQ ID NO: 533 - RNA, 100 nt, synthetic construct
  source 1..100: mol_type = other RNA
gatattgtgacatatctctgcactcatcacacaaaagatgcaaatcttctatatctacaacagggagggggcatttcaatatatctctttttccatcatc

SEQ ID NO: 534 - RNA, 100 nt, synthetic construct
  source 1..100: mol_type = other RNA
gatattgtgacatatctctgcactcatcacacaaaagatgcaaatcttctataacctaaacagggagggggcattctaatatatctctttccgcatcatc

SEQ ID NO: 535 - RNA, 100 nt, synthetic construct
  source 1..100: mol_type = other RNA
gatattgtgacatatctctgcactcatcacacaaaagatgcaaatcttctataacgcagacagggagggggcatcttaatatatctcttcccgcatcatc

SEQ ID NO: 536 - RNA, 100 nt, synthetic construct
  source 1..100: mol_type = other RNA
gatattgtgacatatctctgcactcatcacacaaaagatgcaaatcttctatacttagaacagggagggggcattttaatatatctctagtgatatcatc

SEQ ID NO: 537 - RNA, 100 nt, synthetic construct
  source 1..100: mol_type = other RNA
gatattgtgacatatctctgcactcatcacacaaaagatgcaaatcttctattctccgcacagggagggggcattttaacatatctctatcattatcatc

SEQ ID NO: 538 - RNA, 100 nt, synthetic construct
  source 1..100: mol_type = other RNA
gatattgtgacatatctctgcactcatcacacaaaagatgcaaatcttctatctaccacacagggagggggcatttcaatatatctcttatgatatcatc

SEQ ID NO: 539 - RNA, 100 nt, synthetic construct
  source 1..100: mol_type = other RNA
gatattgtgacatatctctgcactcatcacacaaaagatgcaaatcttctattaattacacagggagggggcattctaatatatctcttcctccatcatc

SEQ ID NO: 540 - RNA, 100 nt, synthetic construct
  source 1..100: mol_type = other RNA
gatattgtgacatatctctgcactcatcacacaaaagatgcaaatcttctattatgtacacagggagggggcatcttaatatatctctatgggtatcatc

SEQ ID NO: 541 - RNA, 100 nt, synthetic construct
  source 1..100: mol_type = other RNA
gatattgtgacatatctctgcactcatcacacaaaagatgcaaatcttctatttcgcgcacagggagggggcattttaatatatctctcagtccatcatc

SEQ ID NO: 542 - RNA, 100 nt, synthetic construct
  source 1..100: mol_type = other RNA
gatattgtgacatatctctgcactcatcacacaaaagatgcaaatcttctaattgcaccacagggagggggcattttaacatatctctctccatatcatc

SEQ ID NO: 543 - RNA, 100 nt, synthetic construct
  source 1..100: mol_type = other RNA
gatattgtgacatatctctgcactcatcacacaaaagatgcaaatcttctagattaaccacagggagggggcatttcaatatatctctcatgccatcatc

SEQ ID NO: 544 - RNA, 100 nt, synthetic construct
  source 1..100: mol_type = other RNA
gatattgtgacatatctctgcactcatcacacaaaagatgcaaatcttctagtcctaccacagggagggggcattctaatatatctcttcctccatcatc

SEQ ID NO: 545 - RNA, 100 nt, synthetic construct
  source 1..100: mol_type = other RNA
gatattgtgacatatctctgcactcatcacacaaaagatgcaaatcttctagacaaaccacagggagggggcatcttaatatatctctacaggtatcatc

SEQ ID NO: 546 - RNA, 100 nt, synthetic construct
  source 1..100: mol_type = other RNA
gatattgtgacatatctctgcactcatcacacaaaagatgcaaatcttctaggctggccacagggagggggcattttaatatatctctaccgttatcatc

SEQ ID NO: 547 - RNA, 100 nt, synthetic construct
  source 1..100: mol_type = other RNA
gatattgtgacatatctctgcactcatcacacaaaagatgcaaatcttcttgattctccacagggagggggcattttaacatatctctcaccgcatcatc

SEQ ID NO: 548 - RNA, 100 nt, synthetic construct
  source 1..100: mol_type = other RNA
gatattgtgacatatctctgcactcatcacacaaaagatgcaaatcttctttacattccacagggagggggcatttcaatatatctcttagtatatcatc

SEQ ID NO: 549 - RNA, 100 nt, synthetic construct
  source 1..100: mol_type = other RNA
gatattgtgacatatctctgcactcatcacacaaaagatgcaaatcttctttcatctccacagggagggggcattctaatatatctctcctcatatcatc

SEQ ID NO: 550 - RNA, 100 nt, synthetic construct
  source 1..100: mol_type = other RNA
gatattgtgacatatctctgcactcatcacacaaaagatgcaaatcttctccaatttccacagggagggggcatcttaatatatctctcccgatatcatc

SEQ ID NO: 551 - RNA, 100 nt, synthetic construct
  source 1..100: mol_type = other RNA
gatattgtgacatatctctgcactcatcacacaaaagatgcaaatcttctttaatctccacagggagggggcattttaatatatctctttccgcatcatc

SEQ ID NO: 552 - RNA, 100 nt, synthetic construct
  source 1..100: mol_type = other RNA
gatattgtgacatatctctgcactcatcacacaaaagatgcaaatcttcactttcatccacagggagggggcattttaacatatctctctcgttatcatc

SEQ ID NO: 553 - RNA, 100 nt, synthetic construct
  source 1..100: mol_type = other RNA
gatattgtgacatatctctgcactcatcacacaaaagatgcaaatcttcgtatccatccacagggagggggcattctaatatatctctttccgcatcatc

SEQ ID NO: 554 - RNA, 100 nt, synthetic construct
  source 1..100: mol_type = other RNA
gatattgtgacatatctctgcactcatcacacaaaagatgcaaatcttcattcatatccacagggagggggcatcttaatatatctcttgttccatcatc

SEQ ID NO: 555 - RNA, 100 nt, synthetic construct
  source 1..100: mol_type = other RNA
gatattgtgacatatctctgcactcatcacacaaaagatgcaaatcttcacttccatccacagggagggggcattttaatatatctctttaaatatcatc

SEQ ID NO: 556 - RNA, 100 nt, synthetic construct
  source 1..100: mol_type = other RNA
gatattgtgacatatctctgcactcatcacacaaaagatgcaaatcttgacaccgatccacagggagggggcatttcaatatatctctaccaatatcatc

SEQ ID NO: 557 - RNA, 100 nt, synthetic construct
  source 1..100: mol_type = other RNA
gatattgtgacatatctctgcactcatcacacaaaagatgcaaatcttgaggtcgatccacagggagggggcattctaatatatctctagttacatcatc

SEQ ID NO: 558 - RNA, 100 nt, synthetic construct
  source 1..100: mol_type = other RNA
gatattgtgacatatctctgcactcatcacacaaaagatgcaaatcttactctcgatccacagggagggggcatcttaatatatctctcgttacatcatc

SEQ ID NO: 559 - RNA, 100 nt, synthetic construct
  source 1..100: mol_type = other RNA
gatattgtgacatatctctgcactcatcacacaaaagatgcaaatcttgcaaatgatccacagggagggggcattttaatatatctctcttggtatcatc

SEQ ID NO: 560 - RNA, 100 nt, synthetic construct
  source 1..100: mol_type = other RNA
gatattgtgacatatctctgcactcatcacacaaaagatgcaaatctcacttcggatccacagggagggggcattttaacatatctctttagatatcatc

SEQ ID NO: 561 - RNA, 100 nt, synthetic construct
  source 1..100: mol_type = other RNA
gatattgtgacatatctctgcactcatcacacaaaagatgcaaatctggccttggatccacagggagggggcatttcaatatatctcttttgccatcatc

SEQ ID NO: 562 - RNA, 100 nt, synthetic construct
  source 1..100: mol_type = other RNA
gatattgtgacatatctctgcactcatcacacaaaagatgcaaatctccctccggatccacagggagggggcattctaatatatctctatcgccatcatc

SEQ ID NO: 563 - RNA, 100 nt, synthetic construct
  source 1..100: mol_type = other RNA
gatattgtgacatatctctgcactcatcacacaaaagatgcaaatctagacacggatccacagggagggggcatcttaatatatctctattgttatcatc

SEQ ID NO: 564 - RNA, 100 nt, synthetic construct
  source 1..100: mol_type = other RNA
gatattgtgacatatctctgcactcatcacacaaaagatgcaaatctgtccctggatccacagggagggggcattttaatatatctcttgtagtatcatc

SEQ ID NO: 565 - RNA, 100 nt, synthetic construct
  source 1..100: mol_type = other RNA
gatattgtgacatatctctgcactcatcacacaaaagatgcaaatcgcgttgaggatccacagggagggggcattttaacatatctctatccctatcatc

SEQ ID NO: 566 - RNA, 100 nt, synthetic construct
  source 1..100: mol_type = other RNA
gatattgtgacatatctctgcactcatcacacaaaagatgcaaatcccgcacaggatccacagggagggggcatttcaatatatctcttccgatatcatc

SEQ ID NO: 567 - RNA, 100 nt, synthetic construct
  source 1..100: mol_type = other RNA
gatattgtgacatatctctgcactcatcacacaaaagatgcaaatcaggaagaggatccacagggagggggcattctaatatatctctttcagtatcatc

SEQ ID NO: 568 - RNA, 100 nt, synthetic construct
  source 1..100: mol_type = other RNA
gatattgtgacatatctctgcactcatcacacaaaagatgcaaatcaagcccaggatccacagggagggggcatcttaatatatctctatcaatatcatc

SEQ ID NO: 569 - RNA, 100 nt, synthetic construct
  source 1..100: mol_type = other RNA
gatattgtgacatatctctgcactcatcacacaaaagatgcaaatcacaaggaggatccacagggagggggcattttaatatatctctatttatatcatc

SEQ ID NO: 570 - RNA, 100 nt, synthetic construct
  source 1..100: mol_type = other RNA
gatattgtgacatatctctgcactcatcacacaaaagatgcaaatgagagctaggatccacagggagggggcattttaacatatctcttcatatatcatc

SEQ ID NO: 571 - RNA, 100 nt, synthetic construct
  source 1..100: mol_type = other RNA
gatattgtgacatatctctgcactcatcacacaaaagatgcaaatggcggttaggatccacagggagggggcatttcaatatatctctttttccatcatc

SEQ ID NO: 572 - RNA, 100 nt, synthetic construct
  source 1..100: mol_type = other RNA
gatattgtgacatatctctgcactcatcacacaaaagatgcaaatggaggttaggatccacagggagggggcattctaatatatctctctaaatatcatc

SEQ ID NO: 573 - RNA, 100 nt, synthetic construct
  source 1..100: mol_type = other RNA
gatattgtgacatatctctgcactcatcacacaaaagatgcaaataccacttaggatccacagggagggggcatcttaatatatctctatccccatcatc

SEQ ID NO: 574 - RNA, 100 nt, synthetic construct
  source 1..100: mol_type = other RNA
gatattgtgacatatctctgcactcatcacacaaaagatgcaaagcaggcataggatccacagggagggggcatttcaatatatctctccagttatcatc

SEQ ID NO: 575 - RNA, 100 nt, synthetic construct
  source 1..100: mol_type = other RNA
gatattgtgacatatctctgcactcatcacacaaaagatgcaaagagagcataggatccacagggagggggcattctaatatatctctcctggtatcatc

SEQ ID NO: 576 - RNA, 100 nt, synthetic construct
  source 1..100: mol_type = other RNA
gatattgtgacatatctctgcactcatcacacaaaagatgcaaacgaggaataggatccacagggagggggcatcttaatatatctctcaccccatcatc

SEQ ID NO: 577 - RNA, 100 nt, synthetic construct
  source 1..100: mol_type = other RNA
gatattgtgacatatctctgcactcatcacacaaaagatgcaaaagccgaataggatccacagggagggggcattttaatatatctctcagtatatcatc

SEQ ID NO: 578 - RNA, 100 nt, synthetic construct
  source 1..100: mol_type = other RNA
gatattgtgacatatctctgcactcatcacacaaaagatgcaacaacgatataggatccacagggagggggcattttaacatatctctatgttcatcatc

SEQ ID NO: 579 - RNA, 100 nt, synthetic construct
  source 1..100: mol_type = other RNA
gatattgtgacatatctctgcactcatcacacaaaagatgcaaccaacgtataggatccacagggagggggcatttcaatatatctctcccttcatcatc

SEQ ID NO: 580 - RNA, 100 nt, synthetic construct
  source 1..100: mol_type = other RNA
gatattgtgacatatctctgcactcatcacacaaaagatgcaatgacaatataggatccacagggagggggcattctaatatatctctccaaatatcatc

SEQ ID NO: 581 - RNA, 100 nt, synthetic construct
  source 1..100: mol_type = other RNA
gatattgtgacatatctctgcactcatcacacaaaagatgcaactggtatataggatccacagggagggggcatcttaatatatctctcgccgcatcatc

SEQ ID NO: 582 - RNA, 100 nt, synthetic construct
  source 1..100: mol_type = other RNA
gatattgtgacatatctctgcactcatcacacaaaagatgcaatgacgatataggatccacagggagggggcattttaatatatctcttataatatcatc

SEQ ID NO: 583 - RNA, 100 nt, synthetic construct
  source 1..100: mol_type = other RNA
gatattgtgacatatctctgcactcatcacacaaaagatgcataagggctataggatccacagggagggggcattttaacatatctcttttaatatcatc

SEQ ID NO: 584 - RNA, 100 nt, synthetic construct
  source 1..100: mol_type = other RNA
gatattgtgacatatctctgcactcatcacacaaaagatgcattcatcctataggatccacagggagggggcattctaatatatctctccaagtatcatc

SEQ ID NO: 585 - RNA, 100 nt, synthetic construct
  source 1..100: mol_type = other RNA
gatattgtgacatatctctgcactcatcacacaaaagatgcaccgaaactataggatccacagggagggggcatcttaatatatctctagtgatatcatc

SEQ ID NO: 586 - RNA, 100 nt, synthetic construct
  source 1..100: mol_type = other RNA
gatattgtgacatatctctgcactcatcacacaaaagatgcatggagactataggatccacagggagggggcattttaatatatctcttattttatcatc

SEQ ID NO: 587 - RNA, 100 nt, synthetic construct
  source 1..100: mol_type = other RNA
gatattgtgacatatctctgcactcatcacacaaaagatgccccatgtctataggatccacagggagggggcattttaacatatctctttccctatcatc

SEQ ID NO: 588 - RNA, 100 nt, synthetic construct
  source 1..100: mol_type = other RNA
gatattgtgacatatctctgcactcatcacacaaaagatgccataactctataggatccacagggagggggcattctaatatatctctacctttatcatc

SEQ ID NO: 589 - RNA, 100 nt, synthetic construct
  source 1..100: mol_type = other RNA
gatattgtgacatatctctgcactcatcacacaaaagatgcctacagtctataggatccacagggagggggcatcttaatatatctctatttacatcatc

SEQ ID NO: 590 - RNA, 100 nt, synthetic construct
  source 1..100: mol_type = other RNA
gatattgtgacatatctctgcactcatcacacaaaagatgcttgccgtctataggatccacagggagggggcattttaatatatctctattaatatcatc

SEQ ID NO: 591 - RNA, 100 nt, synthetic construct
  source 1..100: mol_type = other RNA
gatattgtgacatatctctgcactcatcacacaaaagatgattgggttctataggatccacagggagggggcatttcaatatatctcttccaccatcatc

SEQ ID NO: 592 - RNA, 100 nt, synthetic construct
  source 1..100: mol_type = other RNA
gatattgtgacatatctctgcactcatcacacaaaagatggtatggttctataggatccacagggagggggcattctaatatatctcttcttacatcatc

SEQ ID NO: 593 - RNA, 100 nt, synthetic construct
  source 1..100: mol_type = other RNA
gatattgtgacatatctctgcactcatcacacaaaagatgaccaggttctataggatccacagggagggggcatcttaatatatctcttttggtatcatc

SEQ ID NO: 594 - RNA, 100 nt, synthetic construct
  source 1..100: mol_type = other RNA
gatattgtgacatatctctgcactcatcacacaaaagatgagcgaattctataggatccacagggagggggcattttaatatatctctttttacatcatc

SEQ ID NO: 595 - RNA, 100 nt, synthetic construct
  source 1..100: mol_type = other RNA
gatattgtgacatatctctgcactcatcacacaaaagataatggacttctataggatccacagggagggggcattttaacatatctcttataatatcatc

SEQ ID NO: 596 - RNA, 100 nt, synthetic construct
  source 1..100: mol_type = other RNA
gatattgtgacatatctctgcactcatcacacaaaagatatcgtgcttctataggatccacagggagggggcatttcaatatatctctattcatatcatc

SEQ ID NO: 597 - RNA, 100 nt, synthetic construct
  source 1..100: mol_type = other RNA
gatattgtgacatatctctgcactcatcacacaaaagatttcgtgcttctataggatccacagggagggggcattctaatatatctctacccgcatcatc

SEQ ID NO: 598 - RNA, 100 nt, synthetic construct
  source 1..100: mol_type = other RNA
gatattgtgacatatctctgcactcatcacacaaaagatatccgacttctataggatccacagggagggggcatcttaatatatctctcaccacatcatc

SEQ ID NO: 599 - RNA, 100 nt, synthetic construct
  source 1..100: mol_type = other RNA
gatattgtgacatatctctgcactcatcacacaaaagattcctaccttctataggatccacagggagggggcattttaatatatctctctcggtatcatc

SEQ ID NO: 600 - RNA, 100 nt, synthetic construct
  source 1..100: mol_type = other RNA
gatattgtgacatatctctgcactcatcacacaaaagaccattctcttctataggatccacagggagggggcattttaacatatctcttcccctatcatc

SEQ ID NO: 601 - RNA, 100 nt, synthetic construct
  source 1..100: mol_type = other RNA
gatattgtgacatatctctgcactcatcacacaaaagaaaaacctcttctataggatccacagggagggggcatttcaatatatctcttcaaatatcatc

SEQ ID NO: 602 - RNA, 100 nt, synthetic construct
  source 1..100: mol_type = other RNA
gatattgtgacatatctctgcactcatcacacaaaagaccgttttcttctataggatccacagggagggggcattctaatatatctctccttatatcatc

SEQ ID NO: 603 - RNA, 100 nt, synthetic construct
  source 1..100: mol_type = other RNA
gatattgtgacatatctctgcactcatcacacaaaagagagtcctcttctataggatccacagggagggggcatcttaatatatctctatctccatcatc

SEQ ID NO: 604 - RNA, 100 nt, synthetic construct
  source 1..100: mol_type = other RNA
gatattgtgacatatctctgcactcatcacacaaaagcttgatatcttctataggatccacagggagggggcattttaacatatctctccttgcatcatc

SEQ ID NO: 605 - RNA, 100 nt, synthetic construct
  source 1..100: mol_type = other RNA
gatattgtgacatatctctgcactcatcacacaaaagcgaactatcttctataggatccacagggagggggcatttcaatatatctctccctccatcatc

SEQ ID NO: 606 - RNA, 100 nt, synthetic construct
  source 1..100: mol_type = other RNA
gatattgtgacatatctctgcactcatcacacaaaagctatccatcttctataggatccacagggagggggcattctaatatatctcttcttgcatcatc

SEQ ID NO: 607 - RNA, 100 nt, synthetic construct
  source 1..100: mol_type = other RNA
gatattgtgacatatctctgcactcatcacacaaaagtcagttatcttctataggatccacagggagggggcatcttaatatatctctcgcagtatcatc

SEQ ID NO: 608 - RNA, 100 nt, synthetic construct
  source 1..100: mol_type = other RNA
gatattgtgacatatctctgcactcatcacacaaaagtttgacatcttctataggatccacagggagggggcattttaatatatctctattattatcatc

SEQ ID NO: 609 - RNA, 100 nt, synthetic construct
  source 1..100: mol_type = other RNA
gatattgtgacatatctctgcactcatcacacaaaactatctaatcttctataggatccacagggagggggcattttaacatatctctccttccatcatc

SEQ ID NO: 610 - RNA, 100 nt, synthetic construct
  source 1..100: mol_type = other RNA
gatattgtgacatatctctgcactcatcacacaaaacagaataatcttctataggatccacagggagggggcatttcaatatatctctttcgccatcatc

SEQ ID NO: 611 - RNA, 100 nt, synthetic construct
  source 1..100: mol_type = other RNA
gatattgtgacatatctctgcactcatcacacaaaatccaataatcttctataggatccacagggagggggcattctaatatatctcttcctccatcatc

SEQ ID NO: 612 - RNA, 100 nt, synthetic construct
  source 1..100: mol_type = other RNA
gatattgtgacatatctctgcactcatcacacaaaacccaataatcttctataggatccacagggagggggcatcttaatatatctctacaggtatcatc

SEQ ID NO: 613 - RNA, 100 nt, synthetic construct
  source 1..100: mol_type = other RNA
gatattgtgacatatctctgcactcatcacacaaaacttatcaatcttctataggatccacagggagggggcattttaatatatctctttcggtatcatc

SEQ ID NO: 614 - RNA, 100 nt, synthetic construct
  source 1..100: mol_type = other RNA
gatattgtgacatatctctgcactcatcacacaaatttaaaaaatcttctataggatccacagggagggggcattttaacatatctctacccacatcatc

SEQ ID NO: 615 - RNA, 100 nt, synthetic construct
  source 1..100: mol_type = other RNA
gatattgtgacatatctctgcactcatcacacaaacaccgaaaatcttctataggatccacagggagggggcatttcaatatatctcttagtccatcatc

SEQ ID NO: 616 - RNA, 100 nt, synthetic construct
  source 1..100: mol_type = other RNA
gatattgtgacatatctctgcactcatcacacaaataaataaaatcttctataggatccacagggagggggcatcttaatatatctctcatgccatcatc

SEQ ID NO: 617 - RNA, 100 nt, synthetic construct
  source 1..100: mol_type = other RNA
gatattgtgacatatctctgcactcatcacacaaacttacgaaatcttctataggatccacagggagggggcattttaatatatctctccgtttatcatc

SEQ ID NO: 618 - RNA, 100 nt, synthetic construct
  source 1..100: mol_type = other RNA
gatattgtgacatatctctgcactcatcacacaaccctcccaaatcttctataggatccacagggagggggcattttaacatatctctcgtgatatcatc

SEQ ID NO: 619 - RNA, 100 nt, synthetic construct
  source 1..100: mol_type = other RNA
gatattgtgacatatctctgcactcatcacacaaccttcccaaatcttctataggatccacagggagggggcatttcaatatatctcttcttgcatcatc

SEQ ID NO: 620 - RNA, 100 nt, synthetic construct
  source 1..100: mol_type = other RNA
gatattgtgacatatctctgcactcatcacacaattccaacaaatcttctataggatccacagggagggggcattctaatatatctctatccatatcatc

SEQ ID NO: 621 - RNA, 100 nt, synthetic construct
  source 1..100: mol_type = other RNA
gatattgtgacatatctctgcactcatcacacaacgcgaccaaatcttctataggatccacagggagggggcatcttaatatatctcttatgatatcatc

SEQ ID NO: 622 - RNA, 100 nt, synthetic construct
  source 1..100: mol_type = other RNA
gatattgtgacatatctctgcactcatcacacaaccacatcaaatcttctataggatccacagggagggggcattttaatatatctctcctgttatcatc

SEQ ID NO: 623 - RNA, 100 nt, synthetic construct
  source 1..100: mol_type = other RNA
gatattgtgacatatctctgcactcatcacacacacatggcaaatcttctataggatccacagggagggggcattttaacatatctctccgggtatcatc

SEQ ID NO: 624 - RNA, 100 nt, synthetic construct
  source 1..100: mol_type = other RNA
gatattgtgacatatctctgcactcatcacacactgttagcaaatcttctataggatccacagggagggggcatttcaatatatctctatccgcatcatc

SEQ ID NO: 625 - RNA, 100 nt, synthetic construct
  source 1..100: mol_type = other RNA
gatattgtgacatatctctgcactcatcacacactatcagcaaatcttctataggatccacagggagggggcattctaatatatctctcaccgcatcatc

SEQ ID NO: 626 - RNA, 100 nt, synthetic construct
  source 1..100: mol_type = other RNA
gatattgtgacatatctctgcactcatcacacacttcaagcaaatcttctataggatccacagggagggggcatcttaatatatctctccccgcatcatc

SEQ ID NO: 627 - RNA, 100 nt, synthetic construct
  source 1..100: mol_type = other RNA
gatattgtgacatatctctgcactcatcacacacatcgcgcaaatcttctataggatccacagggagggggcattttaatatatctctttcggtatcatc

SEQ ID NO: 628 - RNA, 100 nt, synthetic construct
  source 1..100: mol_type = other RNA
gatattgtgacatatctctgcactcatcacactgcgattgcaaatcttctataggatccacagggagggggcattttaacatatctctttccgcatcatc

SEQ ID NO: 629 - RNA, 100 nt, synthetic construct
  source 1..100: mol_type = other RNA
gatattgtgacatatctctgcactcatcacactgtctctgcaaatcttctataggatccacagggagggggcatttcaatatatctctccttgcatcatc

SEQ ID NO: 630 - RNA, 100 nt, synthetic construct
  source 1..100: mol_type = other RNA
gatattgtgacatatctctgcactcatcacacccagtttgcaaatcttctataggatccacagggagggggcatcttaatatatctcttcggttatcatc

SEQ ID NO: 631 - RNA, 100 nt, synthetic construct
  source 1..100: mol_type = other RNA
gatattgtgacatatctctgcactcatcacaccctcactgcaaatcttctataggatccacagggagggggcattttaatatatctctatttttatcatc

SEQ ID NO: 632 - RNA, 100 nt, synthetic construct
  source 1..100: mol_type = other RNA
gatattgtgacatatctctgcactcatcacagccatcatgcaaatcttctataggatccacagggagggggcattttaacatatctctctgtccatcatc

SEQ ID NO: 633 - RNA, 100 nt, synthetic construct
  source 1..100: mol_type = other RNA
gatattgtgacatatctctgcactcatcacaaatactatgcaaatcttctataggatccacagggagggggcatttcaatatatctctttcagtatcatc

SEQ ID NO: 634 - RNA, 100 nt, synthetic construct
  source 1..100: mol_type = other RNA
gatattgtgacatatctctgcactcatcacaactcatatgcaaatcttctataggatccacagggagggggcattctaatatatctctatttttatcatc

SEQ ID NO: 635 - RNA, 100 nt, synthetic construct
  source 1..100: mol_type = other RNA
gatattgtgacatatctctgcactcatcacaatggcaatgcaaatcttctataggatccacagggagggggcatcttaatatatctctcgccccatcatc

SEQ ID NO: 636 - RNA, 100 nt, synthetic construct
  source 1..100: mol_type = other RNA
gatattgtgacatatctctgcactcatcacaaaatcaatgcaaatcttctataggatccacagggagggggcattttaatatatctctcttagtatcatc

SEQ ID NO: 637 - RNA, 100 nt, synthetic construct
  source 1..100: mol_type = other RNA
gatattgtgacatatctctgcactcatcacttgtccgatgcaaatcttctataggatccacagggagggggcattttaacatatctctagtagtatcatc

SEQ ID NO: 638 - RNA, 100 nt, synthetic construct
  source 1..100: mol_type = other RNA
gatattgtgacatatctctgcactcatcactataccgatgcaaatcttctataggatccacagggagggggcatttcaatatatctctctccgcatcatc

SEQ ID NO: 639 - RNA, 100 nt, synthetic construct
  source 1..100: mol_type = other RNA
gatattgtgacatatctctgcactcatcactatttcgatgcaaatcttctataggatccacagggagggggcattctaatatatctcttcccacatcatc

SEQ ID NO: 640 - RNA, 100 nt, synthetic construct
  source 1..100: mol_type = other RNA
gatattgtgacatatctctgcactcatcactgatatgatgcaaatcttctataggatccacagggagggggcatcttaatatatctctattgccatcatc

SEQ ID NO: 641 - RNA, 100 nt, synthetic construct
  source 1..100: mol_type = other RNA
gatattgtgacatatctctgcactcatcactattacgatgcaaatcttctataggatccacagggagggggcattttaatatatctctatcaccatcatc

SEQ ID NO: 642 - RNA, 100 nt, synthetic construct
  source 1..100: mol_type = other RNA
gatattgtgacatatctctgcactcatcacacaaaagatgcaaatcttctatagcaaattcagggagggggcattttaacatatctcatttcgaatcatc

SEQ ID NO: 643 - RNA, 100 nt, synthetic construct
  source 1..100: mol_type = other RNA
gatattgtgacatatctctgcactcatcacacaaaagatgcaaatcttctatagtgcagtcagggagggggcatttcaatatatctcaacaagaatcatc

SEQ ID NO: 644 - RNA, 100 nt, synthetic construct
  source 1..100: mol_type = other RNA
gatattgtgacatatctctgcactcatcacacaaaagatgcaaatcttctatagactgatcagggagggggcattctaatatatctcatcgtaaatcatc

SEQ ID NO: 645 - RNA, 100 nt, synthetic construct
  source 1..100: mol_type = other RNA
gatattgtgacatatctctgcactcatcacacaaaagatgcaaatcttctatagaagtgtcagggagggggcatcttaatatatctccagttcaatcatc

SEQ ID NO: 646 - RNA, 100 nt, synthetic construct
  source 1..100: mol_type = other RNA
gatattgtgacatatctctgcactcatcacacaaaagatgcaaatcttctatagccggatcagggagggggcattttaatatatctcctctggaatcatc

SEQ ID NO: 647 - RNA, 100 nt, synthetic construct
  source 1..100: mol_type = other RNA
gatattgtgacatatctctgcactcatcacacaaaagatgcaaatcttctataatcaaaacagggagggggcattttaacatatctccctcaaaatcatc

SEQ ID NO: 648 - RNA, 100 nt, synthetic construct
  source 1..100: mol_type = other RNA
gatattgtgacatatctctgcactcatcacacaaaagatgcaaatcttctataactgcaacagggagggggcatttcaatatatctcgcctggaatcatc

SEQ ID NO: 649 - RNA, 100 nt, synthetic construct
  source 1..100: mol_type = other RNA
gatattgtgacatatctctgcactcatcacacaaaagatgcaaatcttctataaagtggacagggagggggcattctaatatatctcgtttaaaatcatc

SEQ ID NO: 650 - RNA, 100 nt, synthetic construct
  source 1..100: mol_type = other RNA
gatattgtgacatatctctgcactcatcacacaaaagatgcaaatcttctatatttataacagggagggggcatcttaatatatctcgcaggaaatcatc

SEQ ID NO: 651 - RNA, 100 nt, synthetic construct
  source 1..100: mol_type = other RNA
gatattgtgacatatctctgcactcatcacacaaaagatgcaaatcttctatattgcgaacagggagggggcattttaatatatctcccccggaatcatc

SEQ ID NO: 652 - RNA, 100 nt, synthetic construct
  source 1..100: mol_type = other RNA
gatattgtgacatatctctgcactcatcacacaaaagatgcaaatcttctattaaaaacacagggagggggcattttaacatatctcggtccgaatcatc

SEQ ID NO: 653 - RNA, 100 nt, synthetic construct
  source 1..100: mol_type = other RNA
gatattgtgacatatctctgcactcatcacacaaaagatgcaaatcttctattacacgcacagggagggggcatttcaatatatctcccgcagaatcatc

SEQ ID NO: 654 - RNA, 100 nt, synthetic construct
  source 1..100: mol_type = other RNA
gatattgtgacatatctctgcactcatcacacaaaagatgcaaatcttctatctatagcacagggagggggcattctaatatatctcggtttcaatcatc

SEQ ID NO: 655 - RNA, 100 nt, synthetic construct
  source 1..100: mol_type = other RNA
gatattgtgacatatctctgcactcatcacacaaaagatgcaaatcttctatccctggcacagggagggggcatcttaatatatctcgattgaaatcatc

SEQ ID NO: 656 - RNA, 100 nt, synthetic construct
  source 1..100: mol_type = other RNA
gatattgtgacatatctctgcactcatcacacaaaagatgcaaatcttctattccttacacagggagggggcattttaatatatctcatttagaatcatc

SEQ ID NO: 657 - RNA, 100 nt, synthetic construct
  source 1..100: mol_type = other RNA
gatattgtgacatatctctgcactcatcacacaaaagatgcaaatcttctaaacgtaccacagggagggggcattttaacatatctcgcgttaaatcatc

SEQ ID NO: 658 - RNA, 100 nt, synthetic construct
  source 1..100: mol_type = other RNA
gatattgtgacatatctctgcactcatcacacaaaagatgcaaatcttctacaaaaaccacagggagggggcatttcaatatatctcccgcccaatcatc

SEQ ID NO: 659 - RNA, 100 nt, synthetic construct
  source 1..100: mol_type = other RNA
gatattgtgacatatctctgcactcatcacacaaaagatgcaaatcttctactcgcgccacagggagggggcattctaatatatctcgcccgaaatcatc

SEQ ID NO: 660 - RNA, 100 nt, synthetic construct
  source 1..100: mol_type = other RNA
gatattgtgacatatctctgcactcatcacacaaaagatgcaaatcttctaatgcacccacagggagggggcatcttaatatatctcgttttaaatcatc

SEQ ID NO: 661 - RNA, 100 nt, synthetic construct
  source 1..100: mol_type = other RNA
gatattgtgacatatctctgcactcatcacacaaaagatgcaaatcttctacattccccacagggagggggcattttaatatatctcataccgaatcatc

SEQ ID NO: 662 - RNA, 100 nt, synthetic construct
  source 1..100: mol_type = other RNA
gatattgtgacatatctctgcactcatcacacaaaagatgcaaatcttctcctttttccacagggagggggcattttaacatatctcattgtaaatcatc

SEQ ID NO: 663 - RNA, 100 nt, synthetic construct
  source 1..100: mol_type = other RNA
gatattgtgacatatctctgcactcatcacacaaaagatgcaaatcttcttgcatttccacagggagggggcatttcaatatatctcctatggaatcatc

SEQ ID NO: 664 - RNA, 100 nt, synthetic construct
  source 1..100: mol_type = other RNA
gatattgtgacatatctctgcactcatcacacaaaagatgcaaatcttctcctccttccacagggagggggcattctaatatatctcgcgttgaatcatc

SEQ ID NO: 665 - RNA, 100 nt, synthetic construct
  source 1..100: mol_type = other RNA
gatattgtgacatatctctgcactcatcacacaaaagatgcaaatcttctctctactccacagggagggggcatcttaatatatctcgacgaaaatcatc

SEQ ID NO: 666 - RNA, 100 nt, synthetic construct
  source 1..100: mol_type = other RNA
gatattgtgacatatctctgcactcatcacacaaaagatgcaaatcttctcccttttccacagggagggggcattttaatatatctcctatggaatcatc

SEQ ID NO: 667 - RNA, 100 nt, synthetic construct
  source 1..100: mol_type = other RNA
gatattgtgacatatctctgcactcatcacacaaaagatgcaaatcttcaatcttatccacagggagggggcattttaacatatctcccgtcgaatcatc

SEQ ID NO: 668 - RNA, 100 nt, synthetic construct
  source 1..100: mol_type = other RNA
gatattgtgacatatctctgcactcatcacacaaaagatgcaaatcttcctccgcatccacagggagggggcatttcaatatatctcgtatggaatcatc

SEQ ID NO: 669 - RNA, 100 nt, synthetic construct
  source 1..100: mol_type = other RNA
gatattgtgacatatctctgcactcatcacacaaaagatgcaaatcttcgattcaatccacagggagggggcattctaatatatctccatttcaatcatc

SEQ ID NO: 670 - RNA, 100 nt, synthetic construct
  source 1..100: mol_type = other RNA
gatattgtgacatatctctgcactcatcacacaaaagatgcaaatcttcgtcgctatccacagggagggggcatcttaatatatctcctttcgaatcatc

SEQ ID NO: 671 - RNA, 100 nt, synthetic construct
  source 1..100: mol_type = other RNA
gatattgtgacatatctctgcactcatcacacaaaagatgcaaatcttccgcatcatccacagggagggggcattttaatatatctcactgtaaatcatc

SEQ ID NO: 672 - RNA, 100 nt, synthetic construct
  source 1..100: mol_type = other RNA
gatattgtgacatatctctgcactcatcacacaaaagatgcaaatcttacctgcgatccacagggagggggcatttcaatatatctcatttaaaatcatc

SEQ ID NO: 673 - RNA, 100 nt, synthetic construct
  source 1..100: mol_type = other RNA
gatattgtgacatatctctgcactcatcacacaaaagatgcaaatcttacggccgatccacagggagggggcattctaatatatctcattcccaatcatc

SEQ ID NO: 674 - RNA, 100 nt, synthetic construct
  source 1..100: mol_type = other RNA
gatattgtgacatatctctgcactcatcacacaaaagatgcaaatcttggtatcgatccacagggagggggcatcttaatatatctcgtcgggaatcatc

SEQ ID NO: 675 - RNA, 100 nt, synthetic construct
  source 1..100: mol_type = other RNA
gatattgtgacatatctctgcactcatcacacaaaagatgcaaatcttaacgctgatccacagggagggggcattttaatatatctcaaccggaatcatc

SEQ ID NO: 676 - RNA, 100 nt, synthetic construct
  source 1..100: mol_type = other RNA
gatattgtgacatatctctgcactcatcacacaaaagatgcaaatctcaggacggatccacagggagggggcattttaacatatctcacgttgaatcatc

SEQ ID NO: 677 - RNA, 100 nt, synthetic construct
  source 1..100: mol_type = other RNA
gatattgtgacatatctctgcactcatcacacaaaagatgcaaatctataagcggatccacagggagggggcatttcaatatatctcattttcaatcatc

SEQ ID NO: 678 - RNA, 100 nt, synthetic construct
  source 1..100: mol_type = other RNA
gatattgtgacatatctctgcactcatcacacaaaagatgcaaatctcatcgtggatccacagggagggggcatcttaatatatctcccgtagaatcatc

SEQ ID NO: 679 - RNA, 100 nt, synthetic construct
  source 1..100: mol_type = other RNA
gatattgtgacatatctctgcactcatcacacaaaagatgcaaatctaattacggatccacagggagggggcattttaatatatctccatcgaaatcatc

SEQ ID NO: 680 - RNA, 100 nt, synthetic construct
  source 1..100: mol_type = other RNA
gatattgtgacatatctctgcactcatcacacaaaagatgcaaatcggattaaggatccacagggagggggcattttaacatatctcatcccaaatcatc

SEQ ID NO: 681 - RNA, 100 nt, synthetic construct
  source 1..100: mol_type = other RNA
gatattgtgacatatctctgcactcatcacacaaaagatgcaaatcccgcgcaggatccacagggagggggcatttcaatatatctcgctcgaaatcatc

SEQ ID NO: 682 - RNA, 100 nt, synthetic construct
  source 1..100: mol_type = other RNA
gatattgtgacatatctctgcactcatcacacaaaagatgcaaatcctggagaggatccacagggagggggcattctaatatatctccttttaaatcatc

SEQ ID NO: 683 - RNA, 100 nt, synthetic construct
  source 1..100: mol_type = other RNA
gatattgtgacatatctctgcactcatcacacaaaagatgcaaatcccagtcaggatccacagggagggggcatcttaatatatctccttgggaatcatc

SEQ ID NO: 684 - RNA, 100 nt, synthetic construct
  source 1..100: mol_type = other RNA
gatattgtgacatatctctgcactcatcacacaaaagatgcaaatcgggaacaggatccacagggagggggcattttaatatatctcaacccgaatcatc

SEQ ID NO: 685 - RNA, 100 nt, synthetic construct
  source 1..100: mol_type = other RNA
gatattgtgacatatctctgcactcatcacacaaaagatgcaaataccttttaggatccacagggagggggcattttaacatatctcactcagaatcatc

SEQ ID NO: 686 - RNA, 100 nt, synthetic construct
  source 1..100: mol_type = other RNA
gatattgtgacatatctctgcactcatcacacaaaagatgcaaatagtatttaggatccacagggagggggcatttcaatatatctcaagtaaaatcatc

SEQ ID NO: 687 - RNA, 100 nt, synthetic construct
  source 1..100: mol_type = other RNA
gatattgtgacatatctctgcactcatcacacaaaagatgcaaatggacactaggatccacagggagggggcattctaatatatctcaatcgaaatcatc

SEQ ID NO: 688 - RNA, 100 nt, synthetic construct
  source 1..100: mol_type = other RNA
gatattgtgacatatctctgcactcatcacacaaaagatgcaaataagatttaggatccacagggagggggcatcttaatatatctcaagttcaatcatc

SEQ ID NO: 689 - RNA, 100 nt, synthetic construct
  source 1..100: mol_type = other RNA
gatattgtgacatatctctgcactcatcacacaaaagatgcaaatatagtttaggatccacagggagggggcattttaatatatctcgatgtcaatcatc

SEQ ID NO: 690 - RNA, 100 nt, synthetic construct
  source 1..100: mol_type = other RNA
gatattgtgacatatctctgcactcatcacacaaaagatgcaaacaggacataggatccacagggagggggcattttaacatatctcccctcgaatcatc

SEQ ID NO: 691 - RNA, 100 nt, synthetic construct
  source 1..100: mol_type = other RNA
gatattgtgacatatctctgcactcatcacacaaaagatgcaaacaggtgataggatccacagggagggggcattctaatatatctcggtttcaatcatc

SEQ ID NO: 692 - RNA, 100 nt, synthetic construct
  source 1..100: mol_type = other RNA
gatattgtgacatatctctgcactcatcacacaaaagatgcaaacaacccataggatccacagggagggggcatcttaatatatctccaccaaaatcatc

SEQ ID NO: 693 - RNA, 100 nt, synthetic construct
  source 1..100: mol_type = other RNA
gatattgtgacatatctctgcactcatcacacaaaagatgcaaagggtaaataggatccacagggagggggcattttaatatatctcaccatgaatcatc

SEQ ID NO: 694 - RNA, 100 nt, synthetic construct
  source 1..100: mol_type = other RNA
gatattgtgacatatctctgcactcatcacacaaaagatgcaatgtgagtataggatccacagggagggggcattttaacatatctcgcattcaatcatc

SEQ ID NO: 695 - RNA, 100 nt, synthetic construct
  source 1..100: mol_type = other RNA
gatattgtgacatatctctgcactcatcacacaaaagatgcaacctaggtataggatccacagggagggggcatttcaatatatctcaaatcgaatcatc

SEQ ID NO: 696 - RNA, 100 nt, synthetic construct
  source 1..100: mol_type = other RNA
gatattgtgacatatctctgcactcatcacacaaaagatgcaatcacagtataggatccacagggagggggcattctaatatatctcatattaaatcatc

SEQ ID NO: 697 - RNA, 100 nt, synthetic construct
  source 1..100: mol_type = other RNA
gatattgtgacatatctctgcactcatcacacaaaagatgcaacctaagtataggatccacagggagggggcatcttaatatatctcggtgtaaatcatc

SEQ ID NO: 698 - RNA, 100 nt, synthetic construct
  source 1..100: mol_type = other RNA
gatattgtgacatatctctgcactcatcacacaaaagatgcaacgaaggtataggatccacagggagggggcattttaatatatctcccctagaatcatc

SEQ ID NO: 699 - RNA, 100 nt, synthetic construct
  source 1..100: mol_type = other RNA
gatattgtgacatatctctgcactcatcacacaaaagatgcactaaccctataggatccacagggagggggcattttaacatatctcacctagaatcatc

SEQ ID NO: 700 - RNA, 100 nt, synthetic construct
  source 1..100: mol_type = other RNA
gatattgtgacatatctctgcactcatcacacaaaagatgcactggacctataggatccacagggagggggcatttcaatatatctcacccgaaatcatc

SEQ ID NO: 701 - RNA, 100 nt, synthetic construct
  source 1..100: mol_type = other RNA
gatattgtgacatatctctgcactcatcacacaaaagatgcactcaggctataggatccacagggagggggcatcttaatatatctcgctcgaaatcatc

SEQ ID NO: 702 - RNA, 100 nt, synthetic construct
  source 1..100: mol_type = other RNA
gatattgtgacatatctctgcactcatcacacaaaagatgcactaagactataggatccacagggagggggcattttaatatatctcaccttcaatcatc

SEQ ID NO: 703 - RNA, 100 nt, synthetic construct
  source 1..100: mol_type = other RNA
gatattgtgacatatctctgcactcatcacacaaaagatgctcacgatctataggatccacagggagggggcattttaacatatctcaatgtgaatcatc

SEQ ID NO: 704 - RNA, 100 nt, synthetic construct
  source 1..100: mol_type = other RNA
gatattgtgacatatctctgcactcatcacacaaaagatgcccactgtctataggatccacagggagggggcatttcaatatatctccacagaaatcatc

SEQ ID NO: 705 - RNA, 100 nt, synthetic construct
  source 1..100: mol_type = other RNA
gatattgtgacatatctctgcactcatcacacaaaagatgctacctgtctataggatccacagggagggggcattctaatatatctccacgagaatcatc

SEQ ID NO: 706 - RNA, 100 nt, synthetic construct
  source 1..100: mol_type = other RNA
gatattgtgacatatctctgcactcatcacacaaaagatgctactaatctataggatccacagggagggggcatcttaatatatctcgcatgaaatcatc

SEQ ID NO: 707 - RNA, 100 nt, synthetic construct
  source 1..100: mol_type = other RNA
gatattgtgacatatctctgcactcatcacacaaaagatgcttcgggtctataggatccacagggagggggcattttaatatatctcacatggaatcatc

SEQ ID NO: 708 - RNA, 100 nt, synthetic construct
  source 1..100: mol_type = other RNA
gatattgtgacatatctctgcactcatcacacaaaagatggcttgattctataggatccacagggagggggcattttaacatatctccttcagaatcatc

SEQ ID NO: 709 - RNA, 100 nt, synthetic construct
  source 1..100: mol_type = other RNA
gatattgtgacatatctctgcactcatcacacaaaagatgaataaattctataggatccacagggagggggcatttcaatatatctcactcgaaatcatc

SEQ ID NO: 710 - RNA, 100 nt, synthetic construct
  source 1..100: mol_type = other RNA
gatattgtgacatatctctgcactcatcacacaaaagatgacccaattctataggatccacagggagggggcattctaatatatctcgattcgaatcatc

SEQ ID NO: 711 - RNA, 100 nt, synthetic construct
  source 1..100: mol_type = other RNA
gatattgtgacatatctctgcactcatcacacaaaagatggcgttattctataggatccacagggagggggcatcttaatatatctcatttaaaatcatc

SEQ ID NO: 712 - RNA, 100 nt, synthetic construct
  source 1..100: mol_type = other RNA
gatattgtgacatatctctgcactcatcacacaaaagatgaatgaattctataggatccacagggagggggcattttaatatatctcgcatggaatcatc

SEQ ID NO: 713 - RNA, 100 nt, synthetic construct
  source 1..100: mol_type = other RNA
gatattgtgacatatctctgcactcatcacacaaaagattttccacttctataggatccacagggagggggcattttaacatatctccaccaaaatcatc

SEQ ID NO: 714 - RNA, 100 nt, synthetic construct
  source 1..100: mol_type = other RNA
gatattgtgacatatctctgcactcatcacacaaaagatcttccccttctataggatccacagggagggggcatttcaatatatctcactcgaaatcatc

SEQ ID NO: 715 - RNA, 100 nt, synthetic construct
  source 1..100: mol_type = other RNA
gatattgtgacatatctctgcactcatcacacaaaagatccctagcttctataggatccacagggagggggcattctaatatatctcatcgggaatcatc

SEQ ID NO: 716 - RNA, 100 nt, synthetic construct
  source 1..100: mol_type = other RNA
gatattgtgacatatctctgcactcatcacacaaaagatttcgtgcttctataggatccacagggagggggcatcttaatatatctcactttcaatcatc

SEQ ID NO: 717 - RNA, 100 nt, synthetic construct
  source 1..100: mol_type = other RNA
gatattgtgacatatctctgcactcatcacacaaaagataggtcgcttctataggatccacagggagggggcattttaatatatctccctccgaatcatc

SEQ ID NO: 718 - RNA, 100 nt, synthetic construct
  source 1..100: mol_type = other RNA
gatattgtgacatatctctgcactcatcacacaaaagacaggtttcttctataggatccacagggagggggcattttaacatatctcgcttaaaatcatc

SEQ ID NO: 719 - RNA, 100 nt, synthetic construct
  source 1..100: mol_type = other RNA
gatattgtgacatatctctgcactcatcacacaaaagagaaacttcttctataggatccacagggagggggcatttcaatatatctccttcgaaatcatc

SEQ ID NO: 720 - RNA, 100 nt, synthetic construct
  source 1..100: mol_type = other RNA
gatattgtgacatatctctgcactcatcacacaaaagaaaattttcttctataggatccacagggagggggcattctaatatatctcccctggaatcatc

SEQ ID NO: 721 - RNA, 100 nt, synthetic construct
  source 1..100: mol_type = other RNA
gatattgtgacatatctctgcactcatcacacaaaagagtcttctcttctataggatccacagggagggggcatcttaatatatctccttttgaatcatc

SEQ ID NO: 722 - RNA, 100 nt, synthetic construct
  source 1..100: mol_type = other RNA
gatattgtgacatatctctgcactcatcacacaaaagaactctttcttctataggatccacagggagggggcattttaatatatctcattccgaatcatc

SEQ ID NO: 723 - RNA, 100 nt, synthetic construct
  source 1..100: mol_type = other RNA
gatattgtgacatatctctgcactcatcacacaaaagtaagacatcttctataggatccacagggagggggcattttaacatatctcccatagaatcatc

SEQ ID NO: 724 - RNA, 100 nt, synthetic construct
  source 1..100: mol_type = other RNA
gatattgtgacatatctctgcactcatcacacaaaagcgattcatcttctataggatccacagggagggggcatttcaatatatctcgaccccaatcatc

SEQ ID NO: 725 - RNA, 100 nt, synthetic construct
  source 1..100: mol_type = other RNA
gatattgtgacatatctctgcactcatcacacaaaagcgagtcatcttctataggatccacagggagggggcattctaatatatctcggtcgaaatcatc

SEQ ID NO: 726 - RNA, 100 nt, synthetic construct
  source 1..100: mol_type = other RNA
gatattgtgacatatctctgcactcatcacacaaaagcatatcatcttctataggatccacagggagggggcatcttaatatatctcgccccaaatcatc

SEQ ID NO: 727 - RNA, 100 nt, synthetic construct
  source 1..100: mol_type = other RNA
gatattgtgacatatctctgcactcatcacacaaaagcgtttcatcttctataggatccacagggagggggcattttaatatatctcactgtgaatcatc

SEQ ID NO: 728 - RNA, 100 nt, synthetic construct
  source 1..100: mol_type = other RNA
gatattgtgacatatctctgcactcatcacacaaaaatcactaatcttctataggatccacagggagggggcattttaacatatctcattgggaatcatc

SEQ ID NO: 729 - RNA, 100 nt, synthetic construct
  source 1..100: mol_type = other RNA
gatattgtgacatatctctgcactcatcacacaaaatcacttaatcttctataggatccacagggagggggcatttcaatatatctcaagttaaatcatc

SEQ ID NO: 730 - RNA, 100 nt, synthetic construct
  source 1..100: mol_type = other RNA
gatattgtgacatatctctgcactcatcacacaaaaaaacttaatcttctataggatccacagggagggggcattctaatatatctccaccagaatcatc

SEQ ID NO: 731 - RNA, 100 nt, synthetic construct
  source 1..100: mol_type = other RNA
gatattgtgacatatctctgcactcatcacacaaaaattctcaatcttctataggatccacagggagggggcatcttaatatatctcacagggaatcatc

SEQ ID NO: 732 - RNA, 100 nt, synthetic construct
  source 1..100: mol_type = other RNA
gatattgtgacatatctctgcactcatcacacaaaaataaacaatcttctataggatccacagggagggggcattttaatatatctccacgagaatcatc

SEQ ID NO: 733 - RNA, 100 nt, synthetic construct
  source 1..100: mol_type = other RNA
gatattgtgacatatctctgcactcatcacacaaatatcagaaatcttctataggatccacagggagggggcattttaacatatctcgtctaaaatcatc

SEQ ID NO: 734 - RNA, 100 nt, synthetic construct
  source 1..100: mol_type = other RNA
gatattgtgacatatctctgcactcatcacacaaacctggaaaatcttctataggatccacagggagggggcatttcaatatatctcatacccaatcatc

SEQ ID NO: 735 - RNA, 100 nt, synthetic construct
  source 1..100: mol_type = other RNA
gatattgtgacatatctctgcactcatcacacaaacctcgaaaatcttctataggatccacagggagggggcattctaatatatctcccgtaaaatcatc

SEQ ID NO: 736 - RNA, 100 nt, synthetic construct
  source 1..100: mol_type = other RNA
gatattgtgacatatctctgcactcatcacacaaacctacaaaatcttctataggatccacagggagggggcattttaatatatctcacacccaatcatc

SEQ ID NO: 737 - RNA, 100 nt, synthetic construct
  source 1..100: mol_type = other RNA
gatattgtgacatatctctgcactcatcacacaatcagcccaaatcttctataggatccacagggagggggcattttaacatatctcaccagaaatcatc

SEQ ID NO: 738 - RNA, 100 nt, synthetic construct
  source 1..100: mol_type = other RNA
gatattgtgacatatctctgcactcatcacacaacgcattcaaatcttctataggatccacagggagggggcatttcaatatatctcccgtaaaatcatc

SEQ ID NO: 739 - RNA, 100 nt, synthetic construct
  source 1..100: mol_type = other RNA
gatattgtgacatatctctgcactcatcacacaacccacacaaatcttctataggatccacagggagggggcattctaatatatctccatttcaatcatc

SEQ ID NO: 740 - RNA, 100 nt, synthetic construct
  source 1..100: mol_type = other RNA
gatattgtgacatatctctgcactcatcacacaacacactcaaatcttctataggatccacagggagggggcatcttaatatatctcacaccaaatcatc

SEQ ID NO: 741 - RNA, 100 nt, synthetic construct
  source 1..100: mol_type = other RNA
gatattgtgacatatctctgcactcatcacacaacccattcaaatcttctataggatccacagggagggggcattttaatatatctcgacaaaaatcatc

SEQ ID NO: 742 - RNA, 100 nt, synthetic construct
  source 1..100: mol_type = other RNA
gatattgtgacatatctctgcactcatcacacatcgcgcgcaaatcttctataggatccacagggagggggcattttaacatatctcctccgaaatcatc

SEQ ID NO: 743 - RNA, 100 nt, synthetic construct
  source 1..100: mol_type = other RNA
gatattgtgacatatctctgcactcatcacacatgtccagcaaatcttctataggatccacagggagggggcatttcaatatatctcgttcaaaatcatc

SEQ ID NO: 744 - RNA, 100 nt, synthetic construct
  source 1..100: mol_type = other RNA
gatattgtgacatatctctgcactcatcacacaccttgcgcaaatcttctataggatccacagggagggggcattctaatatatctcgttttcaatcatc

SEQ ID NO: 745 - RNA, 100 nt, synthetic construct
  source 1..100: mol_type = other RNA
gatattgtgacatatctctgcactcatcacacatcgtcggcaaatcttctataggatccacagggagggggcatcttaatatatctccttccgaatcatc

SEQ ID NO: 746 - RNA, 100 nt, synthetic construct
  source 1..100: mol_type = other RNA
gatattgtgacatatctctgcactcatcacacattaccggcaaatcttctataggatccacagggagggggcattttaatatatctcacagagaatcatc

SEQ ID NO: 747 - RNA, 100 nt, synthetic construct
  source 1..100: mol_type = other RNA
gatattgtgacatatctctgcactcatcacacctcgattgcaaatcttctataggatccacagggagggggcattttaacatatctcacttcgaatcatc

SEQ ID NO: 748 - RNA, 100 nt, synthetic construct
  source 1..100: mol_type = other RNA
gatattgtgacatatctctgcactcatcacacctccattgcaaatcttctataggatccacagggagggggcatttcaatatatctcccacaaaatcatc

SEQ ID NO: 749 - RNA, 100 nt, synthetic construct
  source 1..100: mol_type = other RNA
gatattgtgacatatctctgcactcatcacactgcgcttgcaaatcttctataggatccacagggagggggcattctaatatatctcacacggaatcatc

SEQ ID NO: 750 - RNA, 100 nt, synthetic construct
  source 1..100: mol_type = other RNA
gatattgtgacatatctctgcactcatcacacttcgtttgcaaatcttctataggatccacagggagggggcatcttaatatatctccattggaatcatc

SEQ ID NO: 751 - RNA, 100 nt, synthetic construct
  source 1..100: mol_type = other RNA
gatattgtgacatatctctgcactcatcacacttatcctgcaaatcttctataggatccacagggagggggcattttaatatatctcggtgagaatcatc

SEQ ID NO: 752 - RNA, 100 nt, synthetic construct
  source 1..100: mol_type = other RNA
gatattgtgacatatctctgcactcatcacaacgctaatgcaaatcttctataggatccacagggagggggcattttaacatatctccaccaaaatcatc

SEQ ID NO: 753 - RNA, 100 nt, synthetic construct
  source 1..100: mol_type = other RNA
gatattgtgacatatctctgcactcatcacagtctgcatgcaaatcttctataggatccacagggagggggcatttcaatatatctccatcgaaatcatc

SEQ ID NO: 754 - RNA, 100 nt, synthetic construct
  source 1..100: mol_type = other RNA
gatattgtgacatatctctgcactcatcacagtccaaatgcaaatcttctataggatccacagggagggggcattctaatatatctcctccccaatcatc

SEQ ID NO: 755 - RNA, 100 nt, synthetic construct
  source 1..100: mol_type = other RNA
gatattgtgacatatctctgcactcatcacaatttgaatgcaaatcttctataggatccacagggagggggcatcttaatatatctcgacaggaatcatc

SEQ ID NO: 756 - RNA, 100 nt, synthetic construct
  source 1..100: mol_type = other RNA
gatattgtgacatatctctgcactcatcacaatgtacatgcaaatcttctataggatccacagggagggggcattttaatatatctcgcggggaatcatc

SEQ ID NO: 757 - RNA, 100 nt, synthetic construct
  source 1..100: mol_type = other RNA
gatattgtgacatatctctgcactcatcactgccgtgatgcaaatcttctataggatccacagggagggggcattttaacatatctcggtttcaatcatc

SEQ ID NO: 758 - RNA, 100 nt, synthetic construct
  source 1..100: mol_type = other RNA
gatattgtgacatatctctgcactcatcacttggttgatgcaaatcttctataggatccacagggagggggcatttcaatatatctcgtttaaaatcatc

SEQ ID NO: 759 - RNA, 100 nt, synthetic construct
  source 1..100: mol_type = other RNA
gatattgtgacatatctctgcactcatcacccctttgatgcaaatcttctataggatccacagggagggggcattctaatatatctcaagtagaatcatc

SEQ ID NO: 760 - RNA, 100 nt, synthetic construct
  source 1..100: mol_type = other RNA
gatattgtgacatatctctgcactcatcaccttttcgatgcaaatcttctataggatccacagggagggggcatcttaatatatctcgattcgaatcatc

SEQ ID NO: 761 - RNA, 100 nt, synthetic construct
  source 1..100: mol_type = other RNA
gatattgtgacatatctctgcactcatcactgtgctgatgcaaatcttctataggatccacagggagggggcattttaatatatctcccatggaatcatc

SEQ ID NO: 762 - RNA, 100 nt, synthetic construct
  source 1..100: mol_type = other RNA
gatattgtgacatatctctgcactcatcacacaaaagatgcaaatcttctatagaaaagtcagggagggggcatttcaatatatctaaattgtaatcatc

SEQ ID NO: 763 - RNA, 100 nt, synthetic construct
  source 1..100: mol_type = other RNA
gatattgtgacatatctctgcactcatcacacaaaagatgcaaatcttctatagcgcaatcagggagggggcatcttaatatatctacgtcgtaatcatc

SEQ ID NO: 764 - RNA, 100 nt, synthetic construct
  source 1..100: mol_type = other RNA
gatattgtgacatatctctgcactcatcacacaaaagatgcaaatcttctatagctcagtcagggagggggcattttaatatatctggtcaataatcatc

SEQ ID NO: 765 - RNA, 100 nt, synthetic construct
  source 1..100: mol_type = other RNA
gatattgtgacatatctctgcactcatcacacaaaagatgcaaatcttctataactgagacagggagggggcattttaacatatctaaatcgtaatcatc

SEQ ID NO: 766 - RNA, 100 nt, synthetic construct
  source 1..100: mol_type = other RNA
gatattgtgacatatctctgcactcatcacacaaaagatgcaaatcttctatatctcaaacagggagggggcatttcaatatatctacaatataatcatc

SEQ ID NO: 767 - RNA, 100 nt, synthetic construct
  source 1..100: mol_type = other RNA
gatattgtgacatatctctgcactcatcacacaaaagatgcaaatcttctatattaagaacagggagggggcatcttaatatatctacgctataatcatc

SEQ ID NO: 768 - RNA, 100 nt, synthetic construct
  source 1..100: mol_type = other RNA
gatattgtgacatatctctgcactcatcacacaaaagatgcaaatcttctataacctaaacagggagggggcattttaatatatctattccataatcatc

SEQ ID NO: 769 - RNA, 100 nt, synthetic construct
  source 1..100: mol_type = other RNA
gatattgtgacatatctctgcactcatcacacaaaagatgcaaatcttctattattgacacagggagggggcattttaacatatctaacctgtaatcatc

SEQ ID NO: 770 - RNA, 100 nt, synthetic construct
  source 1..100: mol_type = other RNA
gatattgtgacatatctctgcactcatcacacaaaagatgcaaatcttctattactagcacagggagggggcatttcaatatatctggtcgataatcatc

SEQ ID NO: 771 - RNA, 100 nt, synthetic construct
  source 1..100: mol_type = other RNA
gatattgtgacatatctctgcactcatcacacaaaagatgcaaatcttctatctagcacacagggagggggcattctaatatatctgcttgataatcatc

SEQ ID NO: 772 - RNA, 100 nt, synthetic construct
  source 1..100: mol_type = other RNA
gatattgtgacatatctctgcactcatcacacaaaagatgcaaatcttctatttcccgcacagggagggggcatcttaatatatctaagcaataatcatc

SEQ ID NO: 773 - RNA, 100 nt, synthetic construct
  source 1..100: mol_type = other RNA
gatattgtgacatatctctgcactcatcacacaaaagatgcaaatcttctatcaccggcacagggagggggcattttaatatatctaattcgtaatcatc

SEQ ID NO: 774 - RNA, 100 nt, synthetic construct
  source 1..100: mol_type = other RNA
gatattgtgacatatctctgcactcatcacacaaaagatgcaaatcttctagcctacccacagggagggggcattttaacatatctggctcataatcatc

SEQ ID NO: 775 - RNA, 100 nt, synthetic construct
  source 1..100: mol_type = other RNA
gatattgtgacatatctctgcactcatcacacaaaagatgcaaatcttctagctcgcccacagggagggggcatttcaatatatctgacccataatcatc

SEQ ID NO: 776 - RNA, 100 nt, synthetic construct
  source 1..100: mol_type = other RNA
gatattgtgacatatctctgcactcatcacacaaaagatgcaaatcttctaacaacgccacagggagggggcattctaatatatctggcttataatcatc

SEQ ID NO: 777 - RNA, 100 nt, synthetic construct
  source 1..100: mol_type = other RNA
gatattgtgacatatctctgcactcatcacacaaaagatgcaaatcttctaatcagcccacagggagggggcatcttaatatatctgaagtgtaatcatc

SEQ ID NO: 778 - RNA, 100 nt, synthetic construct
  source 1..100: mol_type = other RNA
gatattgtgacatatctctgcactcatcacacaaaagatgcaaatcttctagccaccccacagggagggggcattttaatatatctatcacgtaatcatc

SEQ ID NO: 779 - RNA, 100 nt, synthetic construct
  source 1..100: mol_type = other RNA
gatattgtgacatatctctgcactcatcacacaaaagatgcaaatcttctctcgtctccacagggagggggcattttaacatatctgctccgtaatcatc

SEQ ID NO: 780 - RNA, 100 nt, synthetic construct
  source 1..100: mol_type = other RNA
gatattgtgacatatctctgcactcatcacacaaaagatgcaaatcttctccatcttccacagggagggggcatttcaatatatctggtccataatcatc

SEQ ID NO: 781 - RNA, 100 nt, synthetic construct
  source 1..100: mol_type = other RNA
gatattgtgacatatctctgcactcatcacacaaaagatgcaaatcttctcacaattccacagggagggggcattctaatatatctggcgtgtaatcatc

SEQ ID NO: 782 - RNA, 100 nt, synthetic construct
  source 1..100: mol_type = other RNA
gatattgtgacatatctctgcactcatcacacaaaagatgcaaatcttcttaacgttccacagggagggggcatcttaatatatctacttgataatcatc

SEQ ID NO: 783 - RNA, 100 nt, synthetic construct
  source 1..100: mol_type = other RNA
gatattgtgacatatctctgcactcatcacacaaaagatgcaaatcttcttgtatttccacagggagggggcattttaatatatctaagccataatcatc

SEQ ID NO: 784 - RNA, 100 nt, synthetic construct
  source 1..100: mol_type = other RNA
gatattgtgacatatctctgcactcatcacacaaaagatgcaaatcttcgactccatccacagggagggggcattttaacatatctaaaatataatcatc

SEQ ID NO: 785 - RNA, 100 nt, synthetic construct
  source 1..100: mol_type = other RNA
gatattgtgacatatctctgcactcatcacacaaaagatgcaaatcttcgaagaaatccacagggagggggcatttcaatatatctgccgcataatcatc

SEQ ID NO: 786 - RNA, 100 nt, synthetic construct
  source 1..100: mol_type = other RNA
gatattgtgacatatctctgcactcatcacacaaaagatgcaaatcttcatcaccatccacagggagggggcattctaatatatctaaattataatcatc

SEQ ID NO: 787 - RNA, 100 nt, synthetic construct
  source 1..100: mol_type = other RNA
gatattgtgacatatctctgcactcatcacacaaaagatgcaaatcttcacgtttatccacagggagggggcatcttaatatatctactatgtaatcatc

SEQ ID NO: 788 - RNA, 100 nt, synthetic construct
  source 1..100: mol_type = other RNA
gatattgtgacatatctctgcactcatcacacaaaagatgcaaatcttcccctttatccacagggagggggcattttaatatatctattttgtaatcatc

SEQ ID NO: 789 - RNA, 100 nt, synthetic construct
  source 1..100: mol_type = other RNA
gatattgtgacatatctctgcactcatcacacaaaagatgcaaatcttggaatagatccacagggagggggcattttaacatatctacttgataatcatc

SEQ ID NO: 790 - RNA, 100 nt, synthetic construct
  source 1..100: mol_type = other RNA
gatattgtgacatatctctgcactcatcacacaaaagatgcaaatcttgaacgcgatccacagggagggggcatttcaatatatctgcactgtaatcatc

SEQ ID NO: 791 - RNA, 100 nt, synthetic construct
  source 1..100: mol_type = other RNA
gatattgtgacatatctctgcactcatcacacaaaagatgcaaatcttgatatcgatccacagggagggggcattctaatatatctagttaataatcatc

SEQ ID NO: 792 - RNA, 100 nt, synthetic construct
  source 1..100: mol_type = other RNA
gatattgtgacatatctctgcactcatcacacaaaagatgcaaatcttatacctgatccacagggagggggcatcttaatatatctatagtgtaatcatc

SEQ ID NO: 793 - RNA, 100 nt, synthetic construct
  source 1..100: mol_type = other RNA
gatattgtgacatatctctgcactcatcacacaaaagatgcaaatcttaggctcgatccacagggagggggcattttaatatatctaacacataatcatc

SEQ ID NO: 794 - RNA, 100 nt, synthetic construct
  source 1..100: mol_type = other RNA
gatattgtgacatatctctgcactcatcacacaaaagatgcaaatctaggcgtggatccacagggagggggcattttaacatatctaactcgtaatcatc

SEQ ID NO: 795 - RNA, 100 nt, synthetic construct
  source 1..100: mol_type = other RNA
gatattgtgacatatctctgcactcatcacacaaaagatgcaaatctgtgtttggatccacagggagggggcatttcaatatatctagttaataatcatc

SEQ ID NO: 796 - RNA, 100 nt, synthetic construct
  source 1..100: mol_type = other RNA
gatattgtgacatatctctgcactcatcacacaaaagatgcaaatctcatcatggatccacagggagggggcattctaatatatctacctcataatcatc

SEQ ID NO: 797 - RNA, 100 nt, synthetic construct
  source 1..100: mol_type = other RNA
gatattgtgacatatctctgcactcatcacacaaaagatgcaaatctagcagtggatccacagggagggggcatcttaatatatctggcctataatcatc

SEQ ID NO: 798 - RNA, 100 nt, synthetic construct
  source 1..100: mol_type = other RNA
gatattgtgacatatctctgcactcatcacacaaaagatgcaaatctccactcggatccacagggagggggcattttaatatatctgacctataatcatc

SEQ ID NO: 799 - RNA, 100 nt, synthetic construct
  source 1..100: mol_type = other RNA
gatattgtgacatatctctgcactcatcacacaaaagatgcaaatccagttcaggatccacagggagggggcattttaacatatctaccttgtaatcatc

SEQ ID NO: 800 - RNA, 100 nt, synthetic construct
  source 1..100: mol_type = other RNA
gatattgtgacatatctctgcactcatcacacaaaagatgcaaatcggatcgaggatccacagggagggggcatttcaatatatctagtttgtaatcatc

SEQ ID NO: 801 - RNA, 100 nt, synthetic construct
  source 1..100: mol_type = other RNA
gatattgtgacatatctctgcactcatcacacaaaagatgcaaatcgtgatgaggatccacagggagggggcattctaatatatctggcgcgtaatcatc

SEQ ID NO: 802 - RNA, 100 nt, synthetic construct
  source 1..100: mol_type = other RNA
gatattgtgacatatctctgcactcatcacacaaaagatgcaaatcgacctcaggatccacagggagggggcatcttaatatatctgcgcgataatcatc

SEQ ID NO: 803 - RNA, 100 nt, synthetic construct
  source 1..100: mol_type = other RNA
gatattgtgacatatctctgcactcatcacacaaaagatgcaaatccgagcaaggatccacagggagggggcattttaatatatctgcagtgtaatcatc

SEQ ID NO: 804 - RNA, 100 nt, synthetic construct
  source 1..100: mol_type = other RNA
gatattgtgacatatctctgcactcatcacacaaaagatgcaaatatgatctaggatccacagggagggggcattttaacatatctagtatataatcatc

SEQ ID NO: 805 - RNA, 100 nt, synthetic construct
  source 1..100: mol_type = other RNA
gatattgtgacatatctctgcactcatcacacaaaagatgcaaatggtgcctaggatccacagggagggggcatttcaatatatctgatgtataatcatc

SEQ ID NO: 806 - RNA, 100 nt, synthetic construct
  source 1..100: mol_type = other RNA
gatattgtgacatatctctgcactcatcacacaaaagatgcaaatacaggttaggatccacagggagggggcattctaatatatctaacggataatcatc

SEQ ID NO: 807 - RNA, 100 nt, synthetic construct
  source 1..100: mol_type = other RNA
gatattgtgacatatctctgcactcatcacacaaaagatgcaaatgacgtttaggatccacagggagggggcatcttaatatatctacgttgtaatcatc

SEQ ID NO: 808 - RNA, 100 nt, synthetic construct
  source 1..100: mol_type = other RNA
gatattgtgacatatctctgcactcatcacacaaaagatgcaaatatcaattaggatccacagggagggggcattttaatatatctgacctataatcatc

SEQ ID NO: 809 - RNA, 100 nt, synthetic construct
  source 1..100: mol_type = other RNA
gatattgtgacatatctctgcactcatcacacaaaagatgcaaaagaacgataggatccacagggagggggcattttaacatatctaccatgtaatcatc

SEQ ID NO: 810 - RNA, 100 nt, synthetic construct
  source 1..100: mol_type = other RNA
gatattgtgacatatctctgcactcatcacacaaaagatgcaaagggtggataggatccacagggagggggcatttcaatatatctagctcataatcatc

SEQ ID NO: 811 - RNA, 100 nt, synthetic construct
  source 1..100: mol_type = other RNA
gatattgtgacatatctctgcactcatcacacaaaagatgcaaagagccgataggatccacagggagggggcattctaatatatctggcctataatcatc

SEQ ID NO: 812 - RNA, 100 nt, synthetic construct
  source 1..100: mol_type = other RNA
gatattgtgacatatctctgcactcatcacacaaaagatgcaaaatggggataggatccacagggagggggcatcttaatatatctggcttgtaatcatc

SEQ ID NO: 813 - RNA, 100 nt, synthetic construct
  source 1..100: mol_type = other RNA
gatattgtgacatatctctgcactcatcacacaaaagatgcaaaatacacataggatccacagggagggggcattttaatatatctgactcataatcatc

SEQ ID NO: 814 - RNA, 100 nt, synthetic construct
  source 1..100: mol_type = other RNA
gatattgtgacatatctctgcactcatcacacaaaagatgcaacggaaatataggatccacagggagggggcattttaacatatctaatttataatcatc

SEQ ID NO: 815 - RNA, 100 nt, synthetic construct
  source 1..100: mol_type = other RNA
gatattgtgacatatctctgcactcatcacacaaaagatgcaacaggtatataggatccacagggagggggcatttcaatatatctggcggataatcatc

SEQ ID NO: 816 - RNA, 100 nt, synthetic construct
  source 1..100: mol_type = other RNA
gatattgtgacatatctctgcactcatcacacaaaagatgcaaccgacgtataggatccacagggagggggcattctaatatatctaactcgtaatcatc

SEQ ID NO: 817 - RNA, 100 nt, synthetic construct
  source 1..100: mol_type = other RNA
gatattgtgacatatctctgcactcatcacacaaaagatgcaattgccatataggatccacagggagggggcatcttaatatatctattttgtaatcatc

SEQ ID NO: 818 - RNA, 100 nt, synthetic construct
  source 1..100: mol_type = other RNA
gatattgtgacatatctctgcactcatcacacaaaagatgcaacgtacatataggatccacagggagggggcattttaatatatctgattgataatcatc

SEQ ID NO: 819 - RNA, 100 nt, synthetic construct
  source 1..100: mol_type = other RNA
gatattgtgacatatctctgcactcatcacacaaaagatgcataagcactataggatccacagggagggggcattttaacatatctgaaatataatcatc

SEQ ID NO: 820 - RNA, 100 nt, synthetic construct
  source 1..100: mol_type = other RNA
gatattgtgacatatctctgcactcatcacacaaaagatgcactaagcctataggatccacagggagggggcatttcaatatatctgcagtgtaatcatc

SEQ ID NO: 821 - RNA, 100 nt, synthetic construct
  source 1..100: mol_type = other RNA
gatattgtgacatatctctgcactcatcacacaaaagatgcacctgccctataggatccacagggagggggcattctaatatatctggctaataatcatc

SEQ ID NO: 822 - RNA, 100 nt, synthetic construct
  source 1..100: mol_type = other RNA
gatattgtgacatatctctgcactcatcacacaaaagatgcatacgcgctataggatccacagggagggggcatcttaatatatctaccccgtaatcatc

SEQ ID NO: 823 - RNA, 100 nt, synthetic construct
  source 1..100: mol_type = other RNA
gatattgtgacatatctctgcactcatcacacaaaagatgcatccacactataggatccacagggagggggcattttaatatatctaacgcataatcatc

SEQ ID NO: 824 - RNA, 100 nt, synthetic construct
  source 1..100: mol_type = other RNA
gatattgtgacatatctctgcactcatcacacaaaagatgctataaatctataggatccacagggagggggcattttaacatatctgcccgataatcatc

SEQ ID NO: 825 - RNA, 100 nt, synthetic construct
  source 1..100: mol_type = other RNA
gatattgtgacatatctctgcactcatcacacaaaagatgccctatatctataggatccacagggagggggcatttcaatatatctagtttataatcatc

SEQ ID NO: 826 - RNA, 100 nt, synthetic construct
  source 1..100: mol_type = other RNA
gatattgtgacatatctctgcactcatcacacaaaagatgccccgactctataggatccacagggagggggcattctaatatatctagcctataatcatc

SEQ ID NO: 827 - RNA, 100 nt, synthetic construct
  source 1..100: mol_type = other RNA
gatattgtgacatatctctgcactcatcacacaaaagatgccatgactctataggatccacagggagggggcatcttaatatatctaacctgtaatcatc

SEQ ID NO: 828 - RNA, 100 nt, synthetic construct
  source 1..100: mol_type = other RNA
gatattgtgacatatctctgcactcatcacacaaaagatgcctttaatctataggatccacagggagggggcattttaatatatctaacgcgtaatcatc

SEQ ID NO: 829 - RNA, 100 nt, synthetic construct
  source 1..100: mol_type = other RNA
gatattgtgacatatctctgcactcatcacacaaaagatgagcgcattctataggatccacagggagggggcattttaacatatctgcgctgtaatcatc

SEQ ID NO: 830 - RNA, 100 nt, synthetic construct
  source 1..100: mol_type = other RNA
gatattgtgacatatctctgcactcatcacacaaaagatggcctggttctataggatccacagggagggggcatttcaatatatctgccccgtaatcatc

SEQ ID NO: 831 - RNA, 100 nt, synthetic construct
  source 1..100: mol_type = other RNA
gatattgtgacatatctctgcactcatcacacaaaagatgaataagttctataggatccacagggagggggcattctaatatatctagattgtaatcatc

SEQ ID NO: 832 - RNA, 100 nt, synthetic construct
  source 1..100: mol_type = other RNA
gatattgtgacatatctctgcactcatcacacaaaagatgactcgattctataggatccacagggagggggcatcttaatatatctgactcgtaatcatc

SEQ ID NO: 833 - RNA, 100 nt, synthetic construct
  source 1..100: mol_type = other RNA
gatattgtgacatatctctgcactcatcacacaaaagatggtctggttctataggatccacagggagggggcattttaatatatctggtctgtaatcatc

SEQ ID NO: 834 - RNA, 100 nt, synthetic construct
  source 1..100: mol_type = other RNA
gatattgtgacatatctctgcactcatcacacaaaagataggtcgcttctataggatccacagggagggggcattttaacatatctgacatgtaatcatc

SEQ ID NO: 835 - RNA, 100 nt, synthetic construct
  source 1..100: mol_type = other RNA
gatattgtgacatatctctgcactcatcacacaaaagataactgccttctataggatccacagggagggggcatttcaatatatctaatccgtaatcatc

SEQ ID NO: 836 - RNA, 100 nt, synthetic construct
  source 1..100: mol_type = other RNA
gatattgtgacatatctctgcactcatcacacaaaagatattctacttctataggatccacagggagggggcattctaatatatctacctcgtaatcatc

SEQ ID NO: 837 - RNA, 100 nt, synthetic construct
  source 1..100: mol_type = other RNA
gatattgtgacatatctctgcactcatcacacaaaagattatgggcttctataggatccacagggagggggcattttaatatatctgccccgtaatcatc

SEQ ID NO: 838 - RNA, 100 nt, synthetic construct
  source 1..100: mol_type = other RNA
gatattgtgacatatctctgcactcatcacacaaaagaaagtgttcttctataggatccacagggagggggcattttaacatatctattccgtaatcatc

SEQ ID NO: 839 - RNA, 100 nt, synthetic construct
  source 1..100: mol_type = other RNA
gatattgtgacatatctctgcactcatcacacaaaagaaaatgttcttctataggatccacagggagggggcatttcaatatatctggttgataatcatc

SEQ ID NO: 840 - RNA, 100 nt, synthetic construct
  source 1..100: mol_type = other RNA
gatattgtgacatatctctgcactcatcacacaaaagacctctttcttctataggatccacagggagggggcattctaatatatctagtgtgtaatcatc

SEQ ID NO: 841 - RNA, 100 nt, synthetic construct
  source 1..100: mol_type = other RNA
gatattgtgacatatctctgcactcatcacacaaaagaaaggtctcttctataggatccacagggagggggcatcttaatatatctagacgataatcatc

SEQ ID NO: 842 - RNA, 100 nt, synthetic construct
  source 1..100: mol_type = other RNA
gatattgtgacatatctctgcactcatcacacaaaagagaatgttcttctataggatccacagggagggggcattttaatatatctggattgtaatcatc

SEQ ID NO: 843 - RNA, 100 nt, synthetic construct
  source 1..100: mol_type = other RNA
gatattgtgacatatctctgcactcatcacacaaaagctatacatcttctataggatccacagggagggggcattttaacatatctgattcataatcatc

SEQ ID NO: 844 - RNA, 100 nt, synthetic construct
  source 1..100: mol_type = other RNA
gatattgtgacatatctctgcactcatcacacaaaagccttttatcttctataggatccacagggagggggcatttcaatatatctagcctataatcatc

SEQ ID NO: 845 - RNA, 100 nt, synthetic construct
  source 1..100: mol_type = other RNA
gatattgtgacatatctctgcactcatcacacaaaagctcattatcttctataggatccacagggagggggcattctaatatatctagttcgtaatcatc

SEQ ID NO: 846 - RNA, 100 nt, synthetic construct
  source 1..100: mol_type = other RNA
gatattgtgacatatctctgcactcatcacacaaaagtaaaccatcttctataggatccacagggagggggcatcttaatatatctactatgtaatcatc

SEQ ID NO: 847 - RNA, 100 nt, synthetic construct
  source 1..100: mol_type = other RNA
gatattgtgacatatctctgcactcatcacacaaaagcgacctatcttctataggatccacagggagggggcattttaatatatctagcccgtaatcatc

SEQ ID NO: 848 - RNA, 100 nt, synthetic construct
  source 1..100: mol_type = other RNA
gatattgtgacatatctctgcactcatcacacaaaatttcataatcttctataggatccacagggagggggcattttaacatatctgctctgtaatcatc

SEQ ID NO: 849 - RNA, 100 nt, synthetic construct
  source 1..100: mol_type = other RNA
gatattgtgacatatctctgcactcatcacacaaaacaatataatcttctataggatccacagggagggggcatttcaatatatctagcatataatcatc

SEQ ID NO: 850 - RNA, 100 nt, synthetic construct
  source 1..100: mol_type = other RNA
gatattgtgacatatctctgcactcatcacacaaaaacttctaatcttctataggatccacagggagggggcattctaatatatctacaccataatcatc

SEQ ID NO: 851 - RNA, 100 nt, synthetic construct
  source 1..100: mol_type = other RNA
gatattgtgacatatctctgcactcatcacacaaaaactaacaatcttctataggatccacagggagggggcatcttaatatatctataagataatcatc

SEQ ID NO: 852 - RNA, 100 nt, synthetic construct
  source 1..100: mol_type = other RNA
gatattgtgacatatctctgcactcatcacacaaaattcaacaatcttctataggatccacagggagggggcattttaatatatctaccttgtaatcatc

SEQ ID NO: 853 - RNA, 100 nt, synthetic construct
  source 1..100: mol_type = other RNA
gatattgtgacatatctctgcactcatcacacaaactcacaaaatcttctataggatccacagggagggggcattttaacatatctgatccataatcatc

SEQ ID NO: 854 - RNA, 100 nt, synthetic construct
  source 1..100: mol_type = other RNA
gatattgtgacatatctctgcactcatcacacaaataagtaaaatcttctataggatccacagggagggggcatttcaatatatctgacgcataatcatc

SEQ ID NO: 855 - RNA, 100 nt, synthetic construct
  source 1..100: mol_type = other RNA
gatattgtgacatatctctgcactcatcacacaaacttcagaaatcttctataggatccacagggagggggcattctaatatatctggattgtaatcatc

SEQ ID NO: 856 - RNA, 100 nt, synthetic construct
  source 1..100: mol_type = other RNA
gatattgtgacatatctctgcactcatcacacaaatcaaagaaatcttctataggatccacagggagggggcatcttaatatatctacgtgataatcatc

SEQ ID NO: 857 - RNA, 100 nt, synthetic construct
  source 1..100: mol_type = other RNA
gatattgtgacatatctctgcactcatcacacaaatcactgaaatcttctataggatccacagggagggggcattttaatatatctaccgcataatcatc

SEQ ID NO: 858 - RNA, 100 nt, synthetic construct
  source 1..100: mol_type = other RNA
gatattgtgacatatctctgcactcatcacacaacctccacaaatcttctataggatccacagggagggggcattttaacatatctgcccaataatcatc

SEQ ID NO: 859 - RNA, 100 nt, synthetic construct
  source 1..100: mol_type = other RNA
gatattgtgacatatctctgcactcatcacacaacgtcatcaaatcttctataggatccacagggagggggcatttcaatatatctagattgtaatcatc

SEQ ID NO: 860 - RNA, 100 nt, synthetic construct
  source 1..100: mol_type = other RNA
gatattgtgacatatctctgcactcatcacacaatctaaacaaatcttctataggatccacagggagggggcattctaatatatctagttcgtaatcatc

SEQ ID NO: 861 - RNA, 100 nt, synthetic construct
  source 1..100: mol_type = other RNA
gatattgtgacatatctctgcactcatcacacatcctaggcaaatcttctataggatccacagggagggggcattttaacatatctgaaagataatcatc

SEQ ID NO: 862 - RNA, 100 nt, synthetic construct
  source 1..100: mol_type = other RNA
gatattgtgacatatctctgcactcatcacacatcatgcgcaaatcttctataggatccacagggagggggcatttcaatatatctagcgtgtaatcatc

SEQ ID NO: 863 - RNA, 100 nt, synthetic construct
  source 1..100: mol_type = other RNA
gatattgtgacatatctctgcactcatcacacacgcccagcaaatcttctataggatccacagggagggggcattctaatatatctaactcgtaatcatc

SEQ ID NO: 864 - RNA, 100 nt, synthetic construct
  source 1..100: mol_type = other RNA
gatattgtgacatatctctgcactcatcacacactatcggcaaatcttctataggatccacagggagggggcatcttaatatatctgctccataatcatc

SEQ ID NO: 865 - RNA, 100 nt, synthetic construct
  source 1..100: mol_type = other RNA
gatattgtgacatatctctgcactcatcacacaccgttcgcaaatcttctataggatccacagggagggggcattttaatatatctgactcgtaatcatc

SEQ ID NO: 866 - RNA, 100 nt, synthetic construct
  source 1..100: mol_type = other RNA
gatattgtgacatatctctgcactcatcacacccgctctgcaaatcttctataggatccacagggagggggcattttaacatatctacgtcgtaatcatc

SEQ ID NO: 867 - RNA, 100 nt, synthetic construct
  source 1..100: mol_type = other RNA
gatattgtgacatatctctgcactcatcacactgcgtttgcaaatcttctataggatccacagggagggggcatttcaatatatctggtttgtaatcatc

SEQ ID NO: 868 - RNA, 100 nt, synthetic construct
  source 1..100: mol_type = other RNA
gatattgtgacatatctctgcactcatcacacttaccctgcaaatcttctataggatccacagggagggggcattctaatatatctgaagtgtaatcatc

SEQ ID NO: 869 - RNA, 100 nt, synthetic construct
  source 1..100: mol_type = other RNA
gatattgtgacatatctctgcactcatcacacctatactgcaaatcttctataggatccacagggagggggcatcttaatatatctgactaataatcatc

SEQ ID NO: 870 - RNA, 100 nt, synthetic construct
  source 1..100: mol_type = other RNA
gatattgtgacatatctctgcactcatcacaccatctctgcaaatcttctataggatccacagggagggggcattttaatatatctagtctgtaatcatc

SEQ ID NO: 871 - RNA, 100 nt, synthetic construct
  source 1..100: mol_type = other RNA
gatattgtgacatatctctgcactcatcacaagctcaatgcaaatcttctataggatccacagggagggggcattttaacatatctgcagtataatcatc

SEQ ID NO: 872 - RNA, 100 nt, synthetic construct
  source 1..100: mol_type = other RNA
gatattgtgacatatctctgcactcatcacagcccaaatgcaaatcttctataggatccacagggagggggcatttcaatatatctgcatcgtaatcatc

SEQ ID NO: 873 - RNA, 100 nt, synthetic construct
  source 1..100: mol_type = other RNA
gatattgtgacatatctctgcactcatcacagtcataatgcaaatcttctataggatccacagggagggggcattctaatatatctgatttgtaatcatc

SEQ ID NO: 874 - RNA, 100 nt, synthetic construct
  source 1..100: mol_type = other RNA
gatattgtgacatatctctgcactcatcacaagtgctatgcaaatcttctataggatccacagggagggggcatcttaatatatctgatctataatcatc

SEQ ID NO: 875 - RNA, 100 nt, synthetic construct
  source 1..100: mol_type = other RNA
gatattgtgacatatctctgcactcatcacaacgctaatgcaaatcttctataggatccacagggagggggcattttaatatatctggttaataatcatc

SEQ ID NO: 876 - RNA, 100 nt, synthetic construct
  source 1..100: mol_type = other RNA
gatattgtgacatatctctgcactcatcacctggctgatgcaaatcttctataggatccacagggagggggcattttaacatatctagcttgtaatcatc

SEQ ID NO: 877 - RNA, 100 nt, synthetic construct
  source 1..100: mol_type = other RNA
gatattgtgacatatctctgcactcatcacctttgcgatgcaaatcttctataggatccacagggagggggcatttcaatatatctggtagataatcatc

SEQ ID NO: 878 - RNA, 100 nt, synthetic construct
  source 1..100: mol_type = other RNA
gatattgtgacatatctctgcactcatcaccccgccgatgcaaatcttctataggatccacagggagggggcattctaatatatctgactaataatcatc

SEQ ID NO: 879 - RNA, 100 nt, synthetic construct
  source 1..100: mol_type = other RNA
gatattgtgacatatctctgcactcatcactggtgcgatgcaaatcttctataggatccacagggagggggcatcttaatatatctgcgctgtaatcatc

SEQ ID NO: 880 - RNA, 100 nt, synthetic construct
  source 1..100: mol_type = other RNA
gatattgtgacatatctctgcactcatcactaattcgatgcaaatcttctataggatccacagggagggggcattttaatatatctgacaaataatcatc

SEQ ID NO: 881 - RNA, 100 nt, synthetic construct
  source 1..100: mol_type = other RNA
gatattgtgacatatctctgcactcatcacacaaaagatgcaaatcttctatagctgtgtcagggagggggcattttaacatatcgttcacctaatcatc

SEQ ID NO: 882 - RNA, 100 nt, synthetic construct
  source 1..100: mol_type = other RNA
gatattgtgacatatctctgcactcatcacacaaaagatgcaaatcttctatagacatatcagggagggggcatttcaatatatcaccttcctaatcatc

SEQ ID NO: 883 - RNA, 100 nt, synthetic construct
  source 1..100: mol_type = other RNA
gatattgtgacatatctctgcactcatcacacaaaagatgcaaatcttctatagagcgttcagggagggggcattctaatatatccattatctaatcatc

SEQ ID NO: 884 - RNA, 100 nt, synthetic construct
  source 1..100: mol_type = other RNA
gatattgtgacatatctctgcactcatcacacaaaagatgcaaatcttctatagttgtgtcagggagggggcatcttaatatatcaggcttctaatcatc

SEQ ID NO: 885 - RNA, 100 nt, synthetic construct
  source 1..100: mol_type = other RNA
gatattgtgacatatctctgcactcatcacacaaaagatgcaaatcttctatagaacgatcagggagggggcattttaatatatcggcgctctaatcatc

SEQ ID NO: 886 - RNA, 100 nt, synthetic construct
  source 1..100: mol_type = other RNA
gatattgtgacatatctctgcactcatcacacaaaagatgcaaatcttctatatcacggacagggagggggcattttaacatatcgttcatctaatcatc

SEQ ID NO: 887 - RNA, 100 nt, synthetic construct
  source 1..100: mol_type = other RNA
gatattgtgacatatctctgcactcatcacacaaaagatgcaaatcttctataagcaggacagggagggggcatttcaatatatcaagtccctaatcatc

SEQ ID NO: 888 - RNA, 100 nt, synthetic construct
  source 1..100: mol_type = other RNA
gatattgtgacatatctctgcactcatcacacaaaagatgcaaatcttctatacaacaaacagggagggggcattctaatatatccactttctaatcatc

SEQ ID NO: 889 - RNA, 100 nt, synthetic construct
  source 1..100: mol_type = other RNA
gatattgtgacatatctctgcactcatcacacaaaagatgcaaatcttctatactcagaacagggagggggcatcttaatatatcatatccctaatcatc

SEQ ID NO: 890 - RNA, 100 nt, synthetic construct
  source 1..100: mol_type = other RNA
gatattgtgacatatctctgcactcatcacacaaaagatgcaaatcttctatactcgagacagggagggggcattttaatatatcaccttcctaatcatc

SEQ ID NO: 891 - RNA, 100 nt, synthetic construct
  source 1..100: mol_type = other RNA
gatattgtgacatatctctgcactcatcacacaaaagatgcaaatcttctatttcaaacacagggagggggcattttaacatatcacaatcctaatcatc

SEQ ID NO: 892 - RNA, 100 nt, synthetic construct
  source 1..100: mol_type = other RNA
gatattgtgacatatctctgcactcatcacacaaaagatgcaaatcttctatcactagcacagggagggggcatttcaatatatcgtaactctaatcatc

SEQ ID NO: 893 - RNA, 100 nt, synthetic construct
  source 1..100: mol_type = other RNA
gatattgtgacatatctctgcactcatcacacaaaagatgcaaatcttctatttctgacacagggagggggcattctaatatatccacattctaatcatc

SEQ ID NO: 894 - RNA, 100 nt, synthetic construct
  source 1..100: mol_type = other RNA
gatattgtgacatatctctgcactcatcacacaaaagatgcaaatcttctatcctccacacagggagggggcatcttaatatatcggttatctaatcatc

SEQ ID NO: 895 - RNA, 100 nt, synthetic construct
  source 1..100: mol_type = other RNA
gatattgtgacatatctctgcactcatcacacaaaagatgcaaatcttctatccaacgcacagggagggggcattttaatatatcggaaccctaatcatc

SEQ ID NO: 896 - RNA, 100 nt, synthetic construct
  source 1..100: mol_type = other RNA
gatattgtgacatatctctgcactcatcacacaaaagatgcaaatcttctagtccagccacagggagggggcattttaacatatcaggctcctaatcatc

SEQ ID NO: 897 - RNA, 100 nt, synthetic construct
  source 1..100: mol_type = other RNA
gatattgtgacatatctctgcactcatcacacaaaagatgcaaatcttctaaatttcccacagggagggggcatttcaatatatcggccctctaatcatc

SEQ ID NO: 898 - RNA, 100 nt, synthetic construct
  source 1..100: mol_type = other RNA
gatattgtgacatatctctgcactcatcacacaaaagatgcaaatcttctagtatccccacagggagggggcattctaatatatcaggcctctaatcatc

SEQ ID NO: 899 - RNA, 100 nt, synthetic construct
  source 1..100: mol_type = other RNA
gatattgtgacatatctctgcactcatcacacaaaagatgcaaatcttctaaaaataccacagggagggggcatcttaatatatcggcctcctaatcatc

SEQ ID NO: 900 - RNA, 100 nt, synthetic construct
  source 1..100: mol_type = other RNA
gatattgtgacatatctctgcactcatcacacaaaagatgcaaatcttctaagtaaaccacagggagggggcattttaatatatcagacccctaatcatc

SEQ ID NO: 901 - RNA, 100 nt, synthetic construct
  source 1..100: mol_type = other RNA
gatattgtgacatatctctgcactcatcacacaaaagatgcaaatcttctcttttttccacagggagggggcattttaacatatcatactcctaatcatc

SEQ ID NO: 902 - RNA, 100 nt, synthetic construct
  source 1..100: mol_type = other RNA
gatattgtgacatatctctgcactcatcacacaaaagatgcaaatcttcttgaccttccacagggagggggcatttcaatatatcaatcgcctaatcatc

SEQ ID NO: 903 - RNA, 100 nt, synthetic construct
  source 1..100: mol_type = other RNA
gatattgtgacatatctctgcactcatcacacaaaagatgcaaatcttctccgtactccacagggagggggcattctaatatatcaatactctaatcatc

SEQ ID NO: 904 - RNA, 100 nt, synthetic construct
  source 1..100: mol_type = other RNA
gatattgtgacatatctctgcactcatcacacaaaagatgcaaatcttctcctttctccacagggagggggcatcttaatatatcaagctcctaatcatc

SEQ ID NO: 905 - RNA, 100 nt, synthetic construct
  source 1..100: mol_type = other RNA
gatattgtgacatatctctgcactcatcacacaaaagatgcaaatcttctcgacgctccacagggagggggcattttaatatatcgacttcctaatcatc

SEQ ID NO: 906 - RNA, 100 nt, synthetic construct
  source 1..100: mol_type = other RNA
gatattgtgacatatctctgcactcatcacacaaaagatgcaaatcttcaacgccatccacagggagggggcattttaacatatccaaagtctaatcatc

SEQ ID NO: 907 - RNA, 100 nt, synthetic construct
  source 1..100: mol_type = other RNA
gatattgtgacatatctctgcactcatcacacaaaagatgcaaatcttccaacgcatccacagggagggggcatttcaatatatcacctttctaatcatc

SEQ ID NO: 908 - RNA, 100 nt, synthetic construct
  source 1..100: mol_type = other RNA
gatattgtgacatatctctgcactcatcacacaaaagatgcaaatcttcagcgcaatccacagggagggggcattctaatatatcagcatcctaatcatc

SEQ ID NO: 909 - RNA, 100 nt, synthetic construct
  source 1..100: mol_type = other RNA
gatattgtgacatatctctgcactcatcacacaaaagatgcaaatcttcgtgtcaatccacagggagggggcatcttaatatatccaaattctaatcatc

SEQ ID NO: 910 - RNA, 100 nt, synthetic construct
  source 1..100: mol_type = other RNA
gatattgtgacatatctctgcactcatcacacaaaagatgcaaatcttcgaataaatccacagggagggggcattttaatatatcagctttctaatcatc

SEQ ID NO: 911 - RNA, 100 nt, synthetic construct
  source 1..100: mol_type = other RNA
gatattgtgacatatctctgcactcatcacacaaaagatgcaaatcttacgaaagatccacagggagggggcattttaacatatcggaatcctaatcatc

SEQ ID NO: 912 - RNA, 100 nt, synthetic construct
  source 1..100: mol_type = other RNA
gatattgtgacatatctctgcactcatcacacaaaagatgcaaatcttggtcctgatccacagggagggggcatttcaatatatcgtaattctaatcatc

SEQ ID NO: 913 - RNA, 100 nt, synthetic construct
  source 1..100: mol_type = other RNA
gatattgtgacatatctctgcactcatcacacaaaagatgcaaatcttgcacctgatccacagggagggggcattctaatatatcgacaccctaatcatc

SEQ ID NO: 914 - RNA, 100 nt, synthetic construct
  source 1..100: mol_type = other RNA
gatattgtgacatatctctgcactcatcacacaaaagatgcaaatcttaggaaagatccacagggagggggcatcttaatatatcaggtatctaatcatc

SEQ ID NO: 915 - RNA, 100 nt, synthetic construct
  source 1..100: mol_type = other RNA
gatattgtgacatatctctgcactcatcacacaaaagatgcaaatcttacgacagatccacagggagggggcattttaatatatcgtacacctaatcatc

SEQ ID NO: 916 - RNA, 100 nt, synthetic construct
  source 1..100: mol_type = other RNA
gatattgtgacatatctctgcactcatcacacaaaagatgcaaatctgtgggcggatccacagggagggggcattttaacatatcagctccctaatcatc

SEQ ID NO: 917 - RNA, 100 nt, synthetic construct
  source 1..100: mol_type = other RNA
gatattgtgacatatctctgcactcatcacacaaaagatgcaaatctcatcgcggatccacagggagggggcatttcaatatatcggtaccctaatcatc

SEQ ID NO: 918 - RNA, 100 nt, synthetic construct
  source 1..100: mol_type = other RNA
gatattgtgacatatctctgcactcatcacacaaaagatgcaaatctagccttggatccacagggagggggcattctaatatatcgggctcctaatcatc

SEQ ID NO: 919 - RNA, 100 nt, synthetic construct
  source 1..100: mol_type = other RNA
gatattgtgacatatctctgcactcatcacacaaaagatgcaaatctgaacacggatccacagggagggggcatcttaatatatcaagcttctaatcatc

SEQ ID NO: 920 - RNA, 100 nt, synthetic construct
  source 1..100: mol_type = other RNA
gatattgtgacatatctctgcactcatcacacaaaagatgcaaatctgcgcgtggatccacagggagggggcattttaatatatcgccttcctaatcatc

SEQ ID NO: 921 - RNA, 100 nt, synthetic construct
  source 1..100: mol_type = other RNA
gatattgtgacatatctctgcactcatcacacaaaagatgcaaatcctggagaggatccacagggagggggcattttaacatatcaattctctaatcatc

SEQ ID NO: 922 - RNA, 100 nt, synthetic construct
  source 1..100: mol_type = other RNA
gatattgtgacatatctctgcactcatcacacaaaagatgcaaatcgcaaacaggatccacagggagggggcatttcaatatatcgtatctctaatcatc

SEQ ID NO: 923 - RNA, 100 nt, synthetic construct
  source 1..100: mol_type = other RNA
gatattgtgacatatctctgcactcatcacacaaaagatgcaaatcggtgcgaggatccacagggagggggcattctaatatatcaaacttctaatcatc

SEQ ID NO: 924 - RNA, 100 nt, synthetic construct
  source 1..100: mol_type = other RNA
gatattgtgacatatctctgcactcatcacacaaaagatgcaaatcgaggaaaggatccacagggagggggcatcttaatatatcaggcctctaatcatc

SEQ ID NO: 925 - RNA, 100 nt, synthetic construct
  source 1..100: mol_type = other RNA
gatattgtgacatatctctgcactcatcacacaaaagatgcaaatccggaagaggatccacagggagggggcattttaatatatcaaacccctaatcatc

SEQ ID NO: 926 - RNA, 100 nt, synthetic construct
  source 1..100: mol_type = other RNA
gatattgtgacatatctctgcactcatcacacaaaagatgcaaatagcgcctaggatccacagggagggggcattttaacatatcggctttctaatcatc

SEQ ID NO: 927 - RNA, 100 nt, synthetic construct
  source 1..100: mol_type = other RNA
gatattgtgacatatctctgcactcatcacacaaaagatgcaaataagtattaggatccacagggagggggcatttcaatatatcaacattctaatcatc

SEQ ID NO: 928 - RNA, 100 nt, synthetic construct
  source 1..100: mol_type = other RNA
gatattgtgacatatctctgcactcatcacacaaaagatgcaaatagaatttaggatccacagggagggggcatcttaatatatcagctttctaatcatc

SEQ ID NO: 929 - RNA, 100 nt, synthetic construct
  source 1..100: mol_type = other RNA
gatattgtgacatatctctgcactcatcacacaaaagatgcaaatagtagttaggatccacagggagggggcattttaatatatcagatctctaatcatc

SEQ ID NO: 930 - RNA, 100 nt, synthetic construct
  source 1..100: mol_type = other RNA
gatattgtgacatatctctgcactcatcacacaaaagatgcaaaggccacataggatccacagggagggggcatttcaatatatcaagtccctaatcatc

SEQ ID NO: 931 - RNA, 100 nt, synthetic construct
  source 1..100: mol_type = other RNA
gatattgtgacatatctctgcactcatcacacaaaagatgcaaaatagtgataggatccacagggagggggcattctaatatatccaccgcctaatcatc

SEQ ID NO: 932 - RNA, 100 nt, synthetic construct
  source 1..100: mol_type = other RNA
gatattgtgacatatctctgcactcatcacacaaaagatgcaaagaggacataggatccacagggagggggcatcttaatatatcggtcatctaatcatc

SEQ ID NO: 933 - RNA, 100 nt, synthetic construct
  source 1..100: mol_type = other RNA
gatattgtgacatatctctgcactcatcacacaaaagatgcaaagggcaaataggatccacagggagggggcattttaatatatcaggcatctaatcatc

SEQ ID NO: 934 - RNA, 100 nt, synthetic construct
  source 1..100: mol_type = other RNA
gatattgtgacatatctctgcactcatcacacaaaagatgcaacgaccatataggatccacagggagggggcattttaacatatccaaatcctaatcatc

SEQ ID NO: 935 - RNA, 100 nt, synthetic construct
  source 1..100: mol_type = other RNA
gatattgtgacatatctctgcactcatcacacaaaagatgcaaccataatataggatccacagggagggggcatttcaatatatcagtcgtctaatcatc

SEQ ID NO: 936 - RNA, 100 nt, synthetic construct
  source 1..100: mol_type = other RNA
gatattgtgacatatctctgcactcatcacacaaaagatgcaacgaatatataggatccacagggagggggcattctaatatatcgataccctaatcatc

SEQ ID NO: 937 - RNA, 100 nt, synthetic construct
  source 1..100: mol_type = other RNA
gatattgtgacatatctctgcactcatcacacaaaagatgcaattagcatataggatccacagggagggggcatcttaatatatcgccattctaatcatc

SEQ ID NO: 938 - RNA, 100 nt, synthetic construct
  source 1..100: mol_type = other RNA
gatattgtgacatatctctgcactcatcacacaaaagatgcaacgacggtataggatccacagggagggggcattttaatatatcgtgtttctaatcatc

SEQ ID NO: 939 - RNA, 100 nt, synthetic construct
  source 1..100: mol_type = other RNA
gatattgtgacatatctctgcactcatcacacaaaagatgcacctagactataggatccacagggagggggcattttaacatatcggaattctaatcatc

SEQ ID NO: 940 - RNA, 100 nt, synthetic construct
  source 1..100: mol_type = other RNA
gatattgtgacatatctctgcactcatcacacaaaagatgcattggccctataggatccacagggagggggcatttcaatatatccaacacctaatcatc

SEQ ID NO: 941 - RNA, 100 nt, synthetic construct
  source 1..100: mol_type = other RNA
gatattgtgacatatctctgcactcatcacacaaaagatgcacggacactataggatccacagggagggggcattctaatatatcagatttctaatcatc

SEQ ID NO: 942 - RNA, 100 nt, synthetic construct
  source 1..100: mol_type = other RNA
gatattgtgacatatctctgcactcatcacacaaaagatgcatccatactataggatccacagggagggggcatcttaatatatccaacttctaatcatc

SEQ ID NO: 943 - RNA, 100 nt, synthetic construct
  source 1..100: mol_type = other RNA
gatattgtgacatatctctgcactcatcacacaaaagatgcattcgggctataggatccacagggagggggcattttaatatatcaggttcctaatcatc

SEQ ID NO: 944 - RNA, 100 nt, synthetic construct
  source 1..100: mol_type = other RNA
gatattgtgacatatctctgcactcatcacacaaaagatgctccctatctataggatccacagggagggggcattttaacatatccacctcctaatcatc

SEQ ID NO: 945 - RNA, 100 nt, synthetic construct
  source 1..100: mol_type = other RNA
gatattgtgacatatctctgcactcatcacacaaaagatgcctgacctctataggatccacagggagggggcatttcaatatatcggaactctaatcatc

SEQ ID NO: 946 - RNA, 100 nt, synthetic construct
  source 1..100: mol_type = other RNA
gatattgtgacatatctctgcactcatcacacaaaagatgctcgctgtctataggatccacagggagggggcattctaatatatcgtactcctaatcatc

SEQ ID NO: 947 - RNA, 100 nt, synthetic construct
  source 1..100: mol_type = other RNA
gatattgtgacatatctctgcactcatcacacaaaagatgcttgcactctataggatccacagggagggggcatcttaatatatcggctttctaatcatc

SEQ ID NO: 948 - RNA, 100 nt, synthetic construct
  source 1..100: mol_type = other RNA
gatattgtgacatatctctgcactcatcacacaaaagatgcccagaatctataggatccacagggagggggcattttaatatatcagtaatctaatcatc

SEQ ID NO: 949 - RNA, 100 nt, synthetic construct
  source 1..100: mol_type = other RNA
gatattgtgacatatctctgcactcatcacacaaaagatgaatttattctataggatccacagggagggggcattttaacatatcgatactctaatcatc

SEQ ID NO: 950 - RNA, 100 nt, synthetic construct
  source 1..100: mol_type = other RNA
gatattgtgacatatctctgcactcatcacacaaaagatggttgcgttctataggatccacagggagggggcatttcaatatatcacatacctaatcatc

SEQ ID NO: 951 - RNA, 100 nt, synthetic construct
  source 1..100: mol_type = other RNA
gatattgtgacatatctctgcactcatcacacaaaagatgaccgcattctataggatccacagggagggggcatcttaatatatcaggtgcctaatcatc

SEQ ID NO: 952 - RNA, 100 nt, synthetic construct
  source 1..100: mol_type = other RNA
gatattgtgacatatctctgcactcatcacacaaaagatgaacgcattctataggatccacagggagggggcattttaatatatcgcccccctaatcatc

SEQ ID NO: 953 - RNA, 100 nt, synthetic construct
  source 1..100: mol_type = other RNA
gatattgtgacatatctctgcactcatcacacaaaagataccacccttctataggatccacagggagggggcattttaacatatcataagcctaatcatc

SEQ ID NO: 954 - RNA, 100 nt, synthetic construct
  source 1..100: mol_type = other RNA
gatattgtgacatatctctgcactcatcacacaaaagattatgcccttctataggatccacagggagggggcatttcaatatatcgaattcctaatcatc

SEQ ID NO: 955 - RNA, 100 nt, synthetic construct
  source 1..100: mol_type = other RNA
gatattgtgacatatctctgcactcatcacacaaaagattgaccacttctataggatccacagggagggggcattctaatatatcagcatcctaatcatc

SEQ ID NO: 956 - RNA, 100 nt, synthetic construct
  source 1..100: mol_type = other RNA
gatattgtgacatatctctgcactcatcacacaaaagattagtgccttctataggatccacagggagggggcatcttaatatatcaggtccctaatcatc

SEQ ID NO: 957 - RNA, 100 nt, synthetic construct
  source 1..100: mol_type = other RNA
gatattgtgacatatctctgcactcatcacacaaaagattttatacttctataggatccacagggagggggcattttaatatatcgggttcctaatcatc

SEQ ID NO: 958 - RNA, 100 nt, synthetic construct
  source 1..100: mol_type = other RNA
gatattgtgacatatctctgcactcatcacacaaaagacttacctcttctataggatccacagggagggggcattttaacatatcggatatctaatcatc

SEQ ID NO: 959 - RNA, 100 nt, synthetic construct
  source 1..100: mol_type = other RNA
gatattgtgacatatctctgcactcatcacacaaaagactagtttcttctataggatccacagggagggggcatttcaatatatcagctatctaatcatc

SEQ ID NO: 960 - RNA, 100 nt, synthetic construct
  source 1..100: mol_type = other RNA
gatattgtgacatatctctgcactcatcacacaaaagacaaccttcttctataggatccacagggagggggcattctaatatatcgagaccctaatcatc

SEQ ID NO: 961 - RNA, 100 nt, synthetic construct
  source 1..100: mol_type = other RNA
gatattgtgacatatctctgcactcatcacacaaaagaaatcgctcttctataggatccacagggagggggcatcttaatatatccactctctaatcatc

SEQ ID NO: 962 - RNA, 100 nt, synthetic construct
  source 1..100: mol_type = other RNA
gatattgtgacatatctctgcactcatcacacaaaagaacattttcttctataggatccacagggagggggcattttaatatatcagcactctaatcatc

SEQ ID NO: 963 - RNA, 100 nt, synthetic construct
  source 1..100: mol_type = other RNA
gatattgtgacatatctctgcactcatcacacaaaagccctatatcttctataggatccacagggagggggcattttaacatatcggtttcctaatcatc

SEQ ID NO: 964 - RNA, 100 nt, synthetic construct
  source 1..100: mol_type = other RNA
gatattgtgacatatctctgcactcatcacacaaaagtactctatcttctataggatccacagggagggggcatttcaatatatcgagcctctaatcatc

SEQ ID NO: 965 - RNA, 100 nt, synthetic construct
  source 1..100: mol_type = other RNA
gatattgtgacatatctctgcactcatcacacaaaagcacgttatcttctataggatccacagggagggggcattctaatatatcgtgcccctaatcatc

SEQ ID NO: 966 - RNA, 100 nt, synthetic construct
  source 1..100: mol_type = other RNA
gatattgtgacatatctctgcactcatcacacaaaagcacactatcttctataggatccacagggagggggcatcttaatatatcgggcccctaatcatc

SEQ ID NO: 967 - RNA, 100 nt, synthetic construct
  source 1..100: mol_type = other RNA
gatattgtgacatatctctgcactcatcacacaaaagcactccatcttctataggatccacagggagggggcattttaatatatcaggttcctaatcatc

SEQ ID NO: 968 - RNA, 100 nt, synthetic construct
  source 1..100: mol_type = other RNA
gatattgtgacatatctctgcactcatcacacaaaactgaacaatcttctataggatccacagggagggggcatttcaatatatcgacagcctaatcatc

SEQ ID NO: 969 - RNA, 100 nt, synthetic construct
  source 1..100: mol_type = other RNA
gatattgtgacatatctctgcactcatcacacaaaatcgtctaatcttctataggatccacagggagggggcattctaatatatcggttatctaatcatc

SEQ ID NO: 970 - RNA, 100 nt, synthetic construct
  source 1..100: mol_type = other RNA
gatattgtgacatatctctgcactcatcacacaaaatcgaccaatcttctataggatccacagggagggggcatcttaatatatcggaatcctaatcatc

SEQ ID NO: 971 - RNA, 100 nt, synthetic construct
  source 1..100: mol_type = other RNA
gatattgtgacatatctctgcactcatcacacaaaacccagtaatcttctataggatccacagggagggggcattttaatatatcgcatccctaatcatc

SEQ ID NO: 972 - RNA, 100 nt, synthetic construct
  source 1..100: mol_type = other RNA
gatattgtgacatatctctgcactcatcacacaaatcgcagaaatcttctataggatccacagggagggggcattttaacatatcgggcacctaatcatc

SEQ ID NO: 973 - RNA, 100 nt, synthetic construct
  source 1..100: mol_type = other RNA
gatattgtgacatatctctgcactcatcacacaaatttttaaaatcttctataggatccacagggagggggcatttcaatatatcggaagcctaatcatc

SEQ ID NO: 974 - RNA, 100 nt, synthetic construct
  source 1..100: mol_type = other RNA
gatattgtgacatatctctgcactcatcacacaaataaataaaatcttctataggatccacagggagggggcattctaatatatcagattcctaatcatc

SEQ ID NO: 975 - RNA, 100 nt, synthetic construct
  source 1..100: mol_type = other RNA
gatattgtgacatatctctgcactcatcacacaaatatttaaaatcttctataggatccacagggagggggcatcttaatatatcatacgtctaatcatc

SEQ ID NO: 976 - RNA, 100 nt, synthetic construct
  source 1..100: mol_type = other RNA
gatattgtgacatatctctgcactcatcacacaaacatccgaaatcttctataggatccacagggagggggcattttaatatatccacagcctaatcatc

SEQ ID NO: 977 - RNA, 100 nt, synthetic construct
  source 1..100: mol_type = other RNA
gatattgtgacatatctctgcactcatcacacaatgctcccaaatcttctataggatccacagggagggggcattttaacatatcataagtctaatcatc

SEQ ID NO: 978 - RNA, 100 nt, synthetic construct
  source 1..100: mol_type = other RNA
gatattgtgacatatctctgcactcatcacacaactttttcaaatcttctataggatccacagggagggggcatttcaatatatcatatttctaatcatc

SEQ ID NO: 979 - RNA, 100 nt, synthetic construct
  source 1..100: mol_type = other RNA
gatattgtgacatatctctgcactcatcacacaatcaactcaaatcttctataggatccacagggagggggcattctaatatatcggaattctaatcatc

SEQ ID NO: 980 - RNA, 100 nt, synthetic construct
  source 1..100: mol_type = other RNA
gatattgtgacatatctctgcactcatcacacaactacaccaaatcttctataggatccacagggagggggcatcttaatatatcaaaattctaatcatc

SEQ ID NO: 981 - RNA, 100 nt, synthetic construct
  source 1..100: mol_type = other RNA
gatattgtgacatatctctgcactcatcacacacaaatcgcaaatcttctataggatccacagggagggggcattttaacatatccattttctaatcatc

SEQ ID NO: 982 - RNA, 100 nt, synthetic construct
  source 1..100: mol_type = other RNA
gatattgtgacatatctctgcactcatcacacacgcaaagcaaatcttctataggatccacagggagggggcatttcaatatatccacgccctaatcatc

SEQ ID NO: 983 - RNA, 100 nt, synthetic construct
  source 1..100: mol_type = other RNA
gatattgtgacatatctctgcactcatcacacatcacaagcaaatcttctataggatccacagggagggggcattctaatatatcgtcaatctaatcatc

SEQ ID NO: 984 - RNA, 100 nt, synthetic construct
  source 1..100: mol_type = other RNA
gatattgtgacatatctctgcactcatcacacaccgctggcaaatcttctataggatccacagggagggggcatcttaatatatcgtattcctaatcatc

SEQ ID NO: 985 - RNA, 100 nt, synthetic construct
  source 1..100: mol_type = other RNA
gatattgtgacatatctctgcactcatcacacacactcagcaaatcttctataggatccacagggagggggcattttaatatatcgatcttctaatcatc

SEQ ID NO: 986 - RNA, 100 nt, synthetic construct
  source 1..100: mol_type = other RNA
gatattgtgacatatctctgcactcatcacaccgtcgttgcaaatcttctataggatccacagggagggggcattttaacatatcgtgtttctaatcatc

SEQ ID NO: 987 - RNA, 100 nt, synthetic construct
  source 1..100: mol_type = other RNA
gatattgtgacatatctctgcactcatcacacctgtcctgcaaatcttctataggatccacagggagggggcatttcaatatatcagcatcctaatcatc

SEQ ID NO: 988 - RNA, 100 nt, synthetic construct
  source 1..100: mol_type = other RNA
gatattgtgacatatctctgcactcatcacaccgcttctgcaaatcttctataggatccacagggagggggcattctaatatatcgggttcctaatcatc

SEQ ID NO: 989 - RNA, 100 nt, synthetic construct
  source 1..100: mol_type = other RNA
gatattgtgacatatctctgcactcatcacactaacactgcaaatcttctataggatccacagggagggggcatcttaatatatcaactccctaatcatc

SEQ ID NO: 990 - RNA, 100 nt, synthetic construct
  source 1..100: mol_type = other RNA
gatattgtgacatatctctgcactcatcacactttacttgcaaatcttctataggatccacagggagggggcattttaatatatcgtgcttctaatcatc

SEQ ID NO: 991 - RNA, 100 nt, synthetic construct
  source 1..100: mol_type = other RNA
gatattgtgacatatctctgcactcatcacagtcatcatgcaaatcttctataggatccacagggagggggcatttcaatatatcaaaaacctaatcatc

SEQ ID NO: 992 - RNA, 100 nt, synthetic construct
  source 1..100: mol_type = other RNA
gatattgtgacatatctctgcactcatcacaatgtgaatgcaaatcttctataggatccacagggagggggcattctaatatatcgtatctctaatcatc

SEQ ID NO: 993 - RNA, 100 nt, synthetic construct
  source 1..100: mol_type = other RNA
gatattgtgacatatctctgcactcatcacaattactatgcaaatcttctataggatccacagggagggggcatcttaatatatcaaaactctaatcatc

SEQ ID NO: 994 - RNA, 100 nt, synthetic construct
  source 1..100: mol_type = other RNA
gatattgtgacatatctctgcactcatcacagcttaaatgcaaatcttctataggatccacagggagggggcattttaatatatcaacaccctaatcatc

SEQ ID NO: 995 - RNA, 100 nt, synthetic construct
  source 1..100: mol_type = other RNA
gatattgtgacatatctctgcactcatcacttggtcgatgcaaatcttctataggatccacagggagggggcattttaacatatcgggcctctaatcatc

SEQ ID NO: 996 - RNA, 100 nt, synthetic construct
  source 1..100: mol_type = other RNA
gatattgtgacatatctctgcactcatcactgatccgatgcaaatcttctataggatccacagggagggggcatttcaatatatcaacatcctaatcatc

SEQ ID NO: 997 - RNA, 100 nt, synthetic construct
  source 1..100: mol_type = other RNA
gatattgtgacatatctctgcactcatcacttgctcgatgcaaatcttctataggatccacagggagggggcattctaatatatccacactctaatcatc

SEQ ID NO: 998 - RNA, 100 nt, synthetic construct
  source 1..100: mol_type = other RNA
gatattgtgacatatctctgcactcatcactgtcctgatgcaaatcttctataggatccacagggagggggcatcttaatatatcgtaagcctaatcatc

SEQ ID NO: 999 - RNA, 100 nt, synthetic construct
  source 1..100: mol_type = other RNA
gatattgtgacatatctctgcactcatcactgtatcgatgcaaatcttctataggatccacagggagggggcattttaatatatccaatttctaatcatc

SEQ ID NO: 1000 - RNA, 100 nt, synthetic construct
  source 1..100: mol_type = other RNA
gatattgtgacatatctctgcactcatcacacaaaagatgcaaatcttctatatcgcgaacagggagggggcattttaacatataggcgtactaatcatc

SEQ ID NO: 1001 - RNA, 100 nt, synthetic construct
  source 1..100: mol_type = other RNA
gatattgtgacatatctctgcactcatcacacaaaagatgcaaatcttctataaccctaacagggagggggcatttcaatatatgagaatactaatcatc

SEQ ID NO: 1002 - RNA, 100 nt, synthetic construct
  source 1..100: mol_type = other RNA
gatattgtgacatatctctgcactcatcacacaaaagatgcaaatcttctatatcagtaacagggagggggcatcttaatatataaccacactaatcatc

SEQ ID NO: 1003 - RNA, 100 nt, synthetic construct
  source 1..100: mol_type = other RNA
gatattgtgacatatctctgcactcatcacacaaaagatgcaaatcttctatactagtaacagggagggggcattttaatatataggtatactaatcatc

SEQ ID NO: 1004 - RNA, 100 nt, synthetic construct
  source 1..100: mol_type = other RNA
gatattgtgacatatctctgcactcatcacacaaaagatgcaaatcttctatcactggcacagggagggggcattttaacatatggaaccactaatcatc

SEQ ID NO: 1005 - RNA, 100 nt, synthetic construct
  source 1..100: mol_type = other RNA
gatattgtgacatatctctgcactcatcacacaaaagatgcaaatcttctattaacagcacagggagggggcatttcaatatatatgcacactaatcatc

SEQ ID NO: 1006 - RNA, 100 nt, synthetic construct
  source 1..100: mol_type = other RNA
gatattgtgacatatctctgcactcatcacacaaaagatgcaaatcttctatttaacacacagggagggggcattctaatatatggaaatactaatcatc

SEQ ID NO: 1007 - RNA, 100 nt, synthetic construct
  source 1..100: mol_type = other RNA
gatattgtgacatatctctgcactcatcacacaaaagatgcaaatcttctatccctaacacagggagggggcatcttaatatataaggctactaatcatc

SEQ ID NO: 1008 - RNA, 100 nt, synthetic construct
  source 1..100: mol_type = other RNA
gatattgtgacatatctctgcactcatcacacaaaagatgcaaatcttctattagcagcacagggagggggcattttaatatatgagagtactaatcatc

SEQ ID NO: 1009 - RNA, 100 nt, synthetic construct
  source 1..100: mol_type = other RNA
gatattgtgacatatctctgcactcatcacacaaaagatgcaaatcttctaacaatgccacagggagggggcatttcaatatatgcatttactaatcatc

SEQ ID NO: 1010 - RNA, 100 nt, synthetic construct
  source 1..100: mol_type = other RNA
gatattgtgacatatctctgcactcatcacacaaaagatgcaaatcttctacttcgcccacagggagggggcattctaatatatgcatacactaatcatc

SEQ ID NO: 1011 - RNA, 100 nt, synthetic construct
  source 1..100: mol_type = other RNA
gatattgtgacatatctctgcactcatcacacaaaagatgcaaatcttctagttaagccacagggagggggcatcttaatatatatagtcactaatcatc

SEQ ID NO: 1012 - RNA, 100 nt, synthetic construct
  source 1..100: mol_type = other RNA
gatattgtgacatatctctgcactcatcacacaaaagatgcaaatcttctaattaagccacagggagggggcattttaatatatagatacactaatcatc

SEQ ID NO: 1013 - RNA, 100 nt, synthetic construct
  source 1..100: mol_type = other RNA
gatattgtgacatatctctgcactcatcacacaaaagatgcaaatcttctttttcttccacagggagggggcattttaacatatgagagtactaatcatc

SEQ ID NO: 1014 - RNA, 100 nt, synthetic construct
  source 1..100: mol_type = other RNA
gatattgtgacatatctctgcactcatcacacaaaagatgcaaatcttcttattgttccacagggagggggcatttcaatatatataactactaatcatc

SEQ ID NO: 1015 - RNA, 100 nt, synthetic construct
  source 1..100: mol_type = other RNA
gatattgtgacatatctctgcactcatcacacaaaagatgcaaatcttcttgacactccacagggagggggcattctaatatataaacccactaatcatc

SEQ ID NO: 1016 - RNA, 100 nt, synthetic construct
  source 1..100: mol_type = other RNA
gatattgtgacatatctctgcactcatcacacaaaagatgcaaatcttctcttatctccacagggagggggcatcttaatatatgaacctactaatcatc

SEQ ID NO: 1017 - RNA, 100 nt, synthetic construct
  source 1..100: mol_type = other RNA
gatattgtgacatatctctgcactcatcacacaaaagatgcaaatcttcttgtacctccacagggagggggcattttaatatataaccacactaatcatc

SEQ ID NO: 1018 - RNA, 100 nt, synthetic construct
  source 1..100: mol_type = other RNA
gatattgtgacatatctctgcactcatcacacaaaagatgcaaatcttcacttcaatccacagggagggggcattttaacatatattaccactaatcatc

SEQ ID NO: 1019 - RNA, 100 nt, synthetic construct
  source 1..100: mol_type = other RNA
gatattgtgacatatctctgcactcatcacacaaaagatgcaaatcttccagtctatccacagggagggggcatttcaatatatgataccactaatcatc

SEQ ID NO: 1020 - RNA, 100 nt, synthetic construct
  source 1..100: mol_type = other RNA
gatattgtgacatatctctgcactcatcacacaaaagatgcaaatcttccccaccatccacagggagggggcattctaatatatgggactactaatcatc

SEQ ID NO: 1021 - RNA, 100 nt, synthetic construct
  source 1..100: mol_type = other RNA
gatattgtgacatatctctgcactcatcacacaaaagatgcaaatcttcgactccatccacagggagggggcatcttaatatatgcatccactaatcatc

SEQ ID NO: 1022 - RNA, 100 nt, synthetic construct
  source 1..100: mol_type = other RNA
gatattgtgacatatctctgcactcatcacacaaaagatgcaaatcttcaccgaaatccacagggagggggcattttaatatatgcatatactaatcatc

SEQ ID NO: 1023 - RNA, 100 nt, synthetic construct
  source 1..100: mol_type = other RNA
gatattgtgacatatctctgcactcatcacacaaaagatgcaaatcttagtctcgatccacagggagggggcatttcaatatatgaacccactaatcatc

SEQ ID NO: 1024 - RNA, 100 nt, synthetic construct
  source 1..100: mol_type = other RNA
gatattgtgacatatctctgcactcatcacacaaaagatgcaaatcttaatcctgatccacagggagggggcattctaatatataacaacactaatcatc

SEQ ID NO: 1025 - RNA, 100 nt, synthetic construct
  source 1..100: mol_type = other RNA
gatattgtgacatatctctgcactcatcacacaaaagatgcaaatcttggcaccgatccacagggagggggcatcttaatatatagagttactaatcatc

SEQ ID NO: 1026 - RNA, 100 nt, synthetic construct
  source 1..100: mol_type = other RNA
gatattgtgacatatctctgcactcatcacacaaaagatgcaaatcttgatcaagatccacagggagggggcattttaatatatagacgtactaatcatc

SEQ ID NO: 1027 - RNA, 100 nt, synthetic construct
  source 1..100: mol_type = other RNA
gatattgtgacatatctctgcactcatcacacaaaagatgcaaatctgacaatggatccacagggagggggcattttaacatataaccatactaatcatc

SEQ ID NO: 1028 - RNA, 100 nt, synthetic construct
  source 1..100: mol_type = other RNA
gatattgtgacatatctctgcactcatcacacaaaagatgcaaatctagcgctggatccacagggagggggcatttcaatatataacattactaatcatc

SEQ ID NO: 1029 - RNA, 100 nt, synthetic construct
  source 1..100: mol_type = other RNA
gatattgtgacatatctctgcactcatcacacaaaagatgcaaatctcacgacggatccacagggagggggcattctaatatatgcagttactaatcatc

SEQ ID NO: 1030 - RNA, 100 nt, synthetic construct
  source 1..100: mol_type = other RNA
gatattgtgacatatctctgcactcatcacacaaaagatgcaaatctgtttccggatccacagggagggggcatcttaatatatggagccactaatcatc

SEQ ID NO: 1031 - RNA, 100 nt, synthetic construct
  source 1..100: mol_type = other RNA
gatattgtgacatatctctgcactcatcacacaaaagatgcaaatctggctttggatccacagggagggggcattttaatatatacgagcactaatcatc

SEQ ID NO: 1032 - RNA, 100 nt, synthetic construct
  source 1..100: mol_type = other RNA
gatattgtgacatatctctgcactcatcacacaaaagatgcaaatcgacagaaggatccacagggagggggcattttaacatataaagatactaatcatc

SEQ ID NO: 1033 - RNA, 100 nt, synthetic construct
  source 1..100: mol_type = other RNA
gatattgtgacatatctctgcactcatcacacaaaagatgcaaatcctagagaggatccacagggagggggcatttcaatatatataaatactaatcatc

SEQ ID NO: 1034 - RNA, 100 nt, synthetic construct
  source 1..100: mol_type = other RNA
gatattgtgacatatctctgcactcatcacacaaaagatgcaaatcctgcggaggatccacagggagggggcattctaatatataagactactaatcatc

SEQ ID NO: 1035 - RNA, 100 nt, synthetic construct
  source 1..100: mol_type = other RNA
gatattgtgacatatctctgcactcatcacacaaaagatgcaaatccgatcgaggatccacagggagggggcatcttaatatatggttatactaatcatc

SEQ ID NO: 1036 - RNA, 100 nt, synthetic construct
  source 1..100: mol_type = other RNA
gatattgtgacatatctctgcactcatcacacaaaagatgcaaatcaagttcaggatccacagggagggggcattttaatatatagagctactaatcatc

SEQ ID NO: 1037 - RNA, 100 nt, synthetic construct
  source 1..100: mol_type = other RNA
gatattgtgacatatctctgcactcatcacacaaaagatgcaaataaaacctaggatccacagggagggggcattttaacatatacgtacactaatcatc

SEQ ID NO: 1038 - RNA, 100 nt, synthetic construct
  source 1..100: mol_type = other RNA
gatattgtgacatatctctgcactcatcacacaaaagatgcaaatgagacttaggatccacagggagggggcatttcaatatataaacctactaatcatc

SEQ ID NO: 1039 - RNA, 100 nt, synthetic construct
  source 1..100: mol_type = other RNA
gatattgtgacatatctctgcactcatcacacaaaagatgcaaatgaatgctaggatccacagggagggggcatcttaatatatgcatatactaatcatc

SEQ ID NO: 1040 - RNA, 100 nt, synthetic construct
  source 1..100: mol_type = other RNA
gatattgtgacatatctctgcactcatcacacaaaagatgcaaatggcttttaggatccacagggagggggcattttaatatataaacgcactaatcatc

SEQ ID NO: 1041 - RNA, 100 nt, synthetic construct
  source 1..100: mol_type = other RNA
gatattgtgacatatctctgcactcatcacacaaaagatgcaaacgaataataggatccacagggagggggcattttaacatatgatatcactaatcatc

SEQ ID NO: 1042 - RNA, 100 nt, synthetic construct
  source 1..100: mol_type = other RNA
gatattgtgacatatctctgcactcatcacacaaaagatgcaaaagcaacataggatccacagggagggggcatttcaatatatggacttactaatcatc

SEQ ID NO: 1043 - RNA, 100 nt, synthetic construct
  source 1..100: mol_type = other RNA
gatattgtgacatatctctgcactcatcacacaaaagatgcaaaggcataataggatccacagggagggggcattctaatatataattatactaatcatc

SEQ ID NO: 1044 - RNA, 100 nt, synthetic construct
  source 1..100: mol_type = other RNA
gatattgtgacatatctctgcactcatcacacaaaagatgcaaacaccggataggatccacagggagggggcatcttaatatatggatacactaatcatc

SEQ ID NO: 1045 - RNA, 100 nt, synthetic construct
  source 1..100: mol_type = other RNA
gatattgtgacatatctctgcactcatcacacaaaagatgcaaacgagaaataggatccacagggagggggcattttaatatatgggaccactaatcatc

SEQ ID NO: 1046 - RNA, 100 nt, synthetic construct
  source 1..100: mol_type = other RNA
gatattgtgacatatctctgcactcatcacacaaaagatgcaacctcagtataggatccacagggagggggcattttaacatatgaacacactaatcatc

SEQ ID NO: 1047 - RNA, 100 nt, synthetic construct
  source 1..100: mol_type = other RNA
gatattgtgacatatctctgcactcatcacacaaaagatgcaaccagcgtataggatccacagggagggggcatttcaatatatgcagatactaatcatc

SEQ ID NO: 1048 - RNA, 100 nt, synthetic construct
  source 1..100: mol_type = other RNA
gatattgtgacatatctctgcactcatcacacaaaagatgcaacggaaatataggatccacagggagggggcattctaatatatggaatcactaatcatc

SEQ ID NO: 1049 - RNA, 100 nt, synthetic construct
  source 1..100: mol_type = other RNA
gatattgtgacatatctctgcactcatcacacaaaagatgcaattgggatataggatccacagggagggggcatcttaatatatgcaactactaatcatc

SEQ ID NO: 1050 - RNA, 100 nt, synthetic construct
  source 1..100: mol_type = other RNA
gatattgtgacatatctctgcactcatcacacaaaagatgcaacgtgcatataggatccacagggagggggcattttaatatatatgcatactaatcatc

SEQ ID NO: 1051 - RNA, 100 nt, synthetic construct
  source 1..100: mol_type = other RNA
gatattgtgacatatctctgcactcatcacacaaaagatgcattaagcctataggatccacagggagggggcattttaacatatacaagtactaatcatc

SEQ ID NO: 1052 - RNA, 100 nt, synthetic construct
  source 1..100: mol_type = other RNA
gatattgtgacatatctctgcactcatcacacaaaagatgcattatagctataggatccacagggagggggcatttcaatatatatagtcactaatcatc

SEQ ID NO: 1053 - RNA, 100 nt, synthetic construct
  source 1..100: mol_type = other RNA
gatattgtgacatatctctgcactcatcacacaaaagatgcactaggactataggatccacagggagggggcattctaatatataccattactaatcatc

SEQ ID NO: 1054 - RNA, 100 nt, synthetic construct
  source 1..100: mol_type = other RNA
gatattgtgacatatctctgcactcatcacacaaaagatgcataagccctataggatccacagggagggggcatcttaatatatgcatttactaatcatc

SEQ ID NO: 1055 - RNA, 100 nt, synthetic construct
  source 1..100: mol_type = other RNA
gatattgtgacatatctctgcactcatcacacaaaagatgctcgccgtctataggatccacagggagggggcattttaacatatagttacactaatcatc

SEQ ID NO: 1056 - RNA, 100 nt, synthetic construct
  source 1..100: mol_type = other RNA
gatattgtgacatatctctgcactcatcacacaaaagatgccgcccctctataggatccacagggagggggcatttcaatatatagatacactaatcatc

SEQ ID NO: 1057 - RNA, 100 nt, synthetic construct
  source 1..100: mol_type = other RNA
gatattgtgacatatctctgcactcatcacacaaaagatgctcttggtctataggatccacagggagggggcattctaatatataacaacactaatcatc

SEQ ID NO: 1058 - RNA, 100 nt, synthetic construct
  source 1..100: mol_type = other RNA
gatattgtgacatatctctgcactcatcacacaaaagatgctccatatctataggatccacagggagggggcatcttaatatatagtagcactaatcatc

SEQ ID NO: 1059 - RNA, 100 nt, synthetic construct
  source 1..100: mol_type = other RNA
gatattgtgacatatctctgcactcatcacacaaaagatgccctggatctataggatccacagggagggggcattttaatatatgagatcactaatcatc

SEQ ID NO: 1060 - RNA, 100 nt, synthetic construct
  source 1..100: mol_type = other RNA
gatattgtgacatatctctgcactcatcacacaaaagatggtcctattctataggatccacagggagggggcattttaacatatgacatcactaatcatc

SEQ ID NO: 1061 - RNA, 100 nt, synthetic construct
  source 1..100: mol_type = other RNA
gatattgtgacatatctctgcactcatcacacaaaagatggtcgcattctataggatccacagggagggggcatttcaatatataagatcactaatcatc

SEQ ID NO: 1062 - RNA, 100 nt, synthetic construct
  source 1..100: mol_type = other RNA
gatattgtgacatatctctgcactcatcacacaaaagatggcctcgttctataggatccacagggagggggcattctaatatatggagttactaatcatc

SEQ ID NO: 1063 - RNA, 100 nt, synthetic construct
  source 1..100: mol_type = other RNA
gatattgtgacatatctctgcactcatcacacaaaagatgatcgggttctataggatccacagggagggggcatcttaatatatacgcacactaatcatc

SEQ ID NO: 1064 - RNA, 100 nt, synthetic construct
  source 1..100: mol_type = other RNA
gatattgtgacatatctctgcactcatcacacaaaagatggttgggttctataggatccacagggagggggcattttaatatatatacccactaatcatc

SEQ ID NO: 1065 - RNA, 100 nt, synthetic construct
  source 1..100: mol_type = other RNA
gatattgtgacatatctctgcactcatcacacaaaagataattgacttctataggatccacagggagggggcattttaacatatacaagtactaatcatc

SEQ ID NO: 1066 - RNA, 100 nt, synthetic construct
  source 1..100: mol_type = other RNA
gatattgtgacatatctctgcactcatcacacaaaagattattagcttctataggatccacagggagggggcatttcaatatatgaaagtactaatcatc

SEQ ID NO: 1067 - RNA, 100 nt, synthetic construct
  source 1..100: mol_type = other RNA
gatattgtgacatatctctgcactcatcacacaaaagatcttcgccttctataggatccacagggagggggcattctaatatatgaagatactaatcatc

SEQ ID NO: 1068 - RNA, 100 nt, synthetic construct
  source 1..100: mol_type = other RNA
gatattgtgacatatctctgcactcatcacacaaaagattggtcccttctataggatccacagggagggggcatcttaatatatgaagatactaatcatc

SEQ ID NO: 1069 - RNA, 100 nt, synthetic construct
  source 1..100: mol_type = other RNA
gatattgtgacatatctctgcactcatcacacaaaagataggtcgcttctataggatccacagggagggggcattttaatatatatggctactaatcatc

SEQ ID NO: 1070 - RNA, 100 nt, synthetic construct
  source 1..100: mol_type = other RNA
gatattgtgacatatctctgcactcatcacacaaaagaccccgttcttctataggatccacagggagggggcattttaacatatggggtcactaatcatc

SEQ ID NO: 1071 - RNA, 100 nt, synthetic construct
  source 1..100: mol_type = other RNA
gatattgtgacatatctctgcactcatcacacaaaagactcctctcttctataggatccacagggagggggcatttcaatatataattacactaatcatc

SEQ ID NO: 1072 - RNA, 100 nt, synthetic construct
  source 1..100: mol_type = other RNA
gatattgtgacatatctctgcactcatcacacaaaagagagacttcttctataggatccacagggagggggcattctaatatatacgtttactaatcatc

SEQ ID NO: 1073 - RNA, 100 nt, synthetic construct
  source 1..100: mol_type = other RNA
gatattgtgacatatctctgcactcatcacacaaaagacctcgttcttctataggatccacagggagggggcatcttaatatatgcacccactaatcatc

SEQ ID NO: 1074 - RNA, 100 nt, synthetic construct
  source 1..100: mol_type = other RNA
gatattgtgacatatctctgcactcatcacacaaaagagatttctcttctataggatccacagggagggggcattttaatatatacggttactaatcatc

SEQ ID NO: 1075 - RNA, 100 nt, synthetic construct
  source 1..100: mol_type = other RNA
gatattgtgacatatctctgcactcatcacacaaaagtcaggtatcttctataggatccacagggagggggcattttaacatataggaccactaatcatc

SEQ ID NO: 1076 - RNA, 100 nt, synthetic construct
  source 1..100: mol_type = other RNA
gatattgtgacatatctctgcactcatcacacaaaagcgattcatcttctataggatccacagggagggggcatttcaatatataaggttactaatcatc

SEQ ID NO: 1077 - RNA, 100 nt, synthetic construct
  source 1..100: mol_type = other RNA
gatattgtgacatatctctgcactcatcacacaaaagctcgtcatcttctataggatccacagggagggggcattctaatatatggagatactaatcatc

SEQ ID NO: 1078 - RNA, 100 nt, synthetic construct
  source 1..100: mol_type = other RNA
gatattgtgacatatctctgcactcatcacacaaaagtccgtcatcttctataggatccacagggagggggcatcttaatatatgagcccactaatcatc

SEQ ID NO: 1079 - RNA, 100 nt, synthetic construct
  source 1..100: mol_type = other RNA
gatattgtgacatatctctgcactcatcacacaaaagccatctatcttctataggatccacagggagggggcattttaatatataccatcactaatcatc

SEQ ID NO: 1080 - RNA, 100 nt, synthetic construct
  source 1..100: mol_type = other RNA
gatattgtgacatatctctgcactcatcacacaaaatctcgtaatcttctataggatccacagggagggggcattttaacatatgcaattactaatcatc

SEQ ID NO: 1081 - RNA, 100 nt, synthetic construct
  source 1..100: mol_type = other RNA
gatattgtgacatatctctgcactcatcacacaaaaacccataatcttctataggatccacagggagggggcatttcaatatatagatatactaatcatc

SEQ ID NO: 1082 - RNA, 100 nt, synthetic construct
  source 1..100: mol_type = other RNA
gatattgtgacatatctctgcactcatcacacaaaactactcaatcttctataggatccacagggagggggcattctaatatatatacgtactaatcatc

SEQ ID NO: 1083 - RNA, 100 nt, synthetic construct
  source 1..100: mol_type = other RNA
gatattgtgacatatctctgcactcatcacacaaaaacgtttaatcttctataggatccacagggagggggcatcttaatatatggagatactaatcatc

SEQ ID NO: 1084 - RNA, 100 nt, synthetic construct
  source 1..100: mol_type = other RNA
gatattgtgacatatctctgcactcatcacacaaattctagaaatcttctataggatccacagggagggggcatttcaatatataaatttactaatcatc

SEQ ID NO: 1085 - RNA, 100 nt, synthetic construct
  source 1..100: mol_type = other RNA
gatattgtgacatatctctgcactcatcacacaaatcaaaaaaatcttctataggatccacagggagggggcattctaatatataaggccactaatcatc

SEQ ID NO: 1086 - RNA, 100 nt, synthetic construct
  source 1..100: mol_type = other RNA
gatattgtgacatatctctgcactcatcacacaaacgcccaaaatcttctataggatccacagggagggggcatcttaatatataagtttactaatcatc

SEQ ID NO: 1087 - RNA, 100 nt, synthetic construct
  source 1..100: mol_type = other RNA
gatattgtgacatatctctgcactcatcacacaaacatcagaaatcttctataggatccacagggagggggcattttaatatatgatcacactaatcatc

SEQ ID NO: 1088 - RNA, 100 nt, synthetic construct
  source 1..100: mol_type = other RNA
gatattgtgacatatctctgcactcatcacacaatccagtcaaatcttctataggatccacagggagggggcattttaacatatagagtcactaatcatc

SEQ ID NO: 1089 - RNA, 100 nt, synthetic construct
  source 1..100: mol_type = other RNA
gatattgtgacatatctctgcactcatcacacaatctgaccaaatcttctataggatccacagggagggggcatttcaatatataagtctactaatcatc

SEQ ID NO: 1090 - RNA, 100 nt, synthetic construct
  source 1..100: mol_type = other RNA
gatattgtgacatatctctgcactcatcacacaattacttcaaatcttctataggatccacagggagggggcattctaatatatatgcctactaatcatc

SEQ ID NO: 1091 - RNA, 100 nt, synthetic construct
  source 1..100: mol_type = other RNA
gatattgtgacatatctctgcactcatcacacaacctaaccaaatcttctataggatccacagggagggggcatcttaatatataaacccactaatcatc

SEQ ID NO: 1092 - RNA, 100 nt, synthetic construct
  source 1..100: mol_type = other RNA
gatattgtgacatatctctgcactcatcacacaatcttaccaaatcttctataggatccacagggagggggcattttaatatatgcaattactaatcatc

SEQ ID NO: 1093 - RNA, 100 nt, synthetic construct
  source 1..100: mol_type = other RNA
gatattgtgacatatctctgcactcatcacacattgtcagcaaatcttctataggatccacagggagggggcattttaacatatacgaatactaatcatc

SEQ ID NO: 1094 - RNA, 100 nt, synthetic construct
  source 1..100: mol_type = other RNA
gatattgtgacatatctctgcactcatcacacacccatcgcaaatcttctataggatccacagggagggggcatttcaatatatggggtcactaatcatc

SEQ ID NO: 1095 - RNA, 100 nt, synthetic construct
  source 1..100: mol_type = other RNA
gatattgtgacatatctctgcactcatcacacattgtcggcaaatcttctataggatccacagggagggggcattctaatatatagaattactaatcatc

SEQ ID NO: 1096 - RNA, 100 nt, synthetic construct
  source 1..100: mol_type = other RNA
gatattgtgacatatctctgcactcatcacacatccacagcaaatcttctataggatccacagggagggggcatcttaatatatggagccactaatcatc

SEQ ID NO: 1097 - RNA, 100 nt, synthetic construct
  source 1..100: mol_type = other RNA
gatattgtgacatatctctgcactcatcacacacgcatggcaaatcttctataggatccacagggagggggcattttaatatatagaaatactaatcatc

SEQ ID NO: 1098 - RNA, 100 nt, synthetic construct
  source 1..100: mol_type = other RNA
gatattgtgacatatctctgcactcatcacactcatcttgcaaatcttctataggatccacagggagggggcattttaacatatacacatactaatcatc

SEQ ID NO: 1099 - RNA, 100 nt, synthetic construct
  source 1..100: mol_type = other RNA
gatattgtgacatatctctgcactcatcacactttaactgcaaatcttctataggatccacagggagggggcatttcaatatatgaccacactaatcatc

SEQ ID NO: 1100 - RNA, 100 nt, synthetic construct
  source 1..100: mol_type = other RNA
gatattgtgacatatctctgcactcatcacacctctattgcaaatcttctataggatccacagggagggggcattctaatatatgatattactaatcatc

SEQ ID NO: 1101 - RNA, 100 nt, synthetic construct
  source 1..100: mol_type = other RNA
gatattgtgacatatctctgcactcatcacactgccactgcaaatcttctataggatccacagggagggggcatcttaatatatggacacactaatcatc

SEQ ID NO: 1102 - RNA, 100 nt, synthetic construct
  source 1..100: mol_type = other RNA
gatattgtgacatatctctgcactcatcacactgcttttgcaaatcttctataggatccacagggagggggcattttaatatataatattactaatcatc

SEQ ID NO: 1103 - RNA, 100 nt, synthetic construct
  source 1..100: mol_type = other RNA
gatattgtgacatatctctgcactcatcacagcacccatgcaaatcttctataggatccacagggagggggcattttaacatatgcgaccactaatcatc

SEQ ID NO: 1104 - RNA, 100 nt, synthetic construct
  source 1..100: mol_type = other RNA
gatattgtgacatatctctgcactcatcacaaggtctatgcaaatcttctataggatccacagggagggggcatttcaatatatgcgtccactaatcatc

SEQ ID NO: 1105 - RNA, 100 nt, synthetic construct
  source 1..100: mol_type = other RNA
gatattgtgacatatctctgcactcatcacagtatacatgcaaatcttctataggatccacagggagggggcattctaatatatgcgtttactaatcatc

SEQ ID NO: 1106 - RNA, 100 nt, synthetic construct
  source 1..100: mol_type = other RNA
gatattgtgacatatctctgcactcatcacagtctaaatgcaaatcttctataggatccacagggagggggcatcttaatatatggttacactaatcatc

SEQ ID NO: 1107 - RNA, 100 nt, synthetic construct
  source 1..100: mol_type = other RNA
gatattgtgacatatctctgcactcatcacagttgccatgcaaatcttctataggatccacagggagggggcattttaatatatatacgcactaatcatc

SEQ ID NO: 1108 - RNA, 100 nt, synthetic construct
  source 1..100: mol_type = other RNA
gatattgtgacatatctctgcactcatcacctactcgatgcaaatcttctataggatccacagggagggggcattttaacatatgcagctactaatcatc

SEQ ID NO: 1109 - RNA, 100 nt, synthetic construct
  source 1..100: mol_type = other RNA
gatattgtgacatatctctgcactcatcactgccccgatgcaaatcttctataggatccacagggagggggcatttcaatatatgggtccactaatcatc

SEQ ID NO: 1110 - RNA, 100 nt, synthetic construct
  source 1..100: mol_type = other RNA
gatattgtgacatatctctgcactcatcactgccttgatgcaaatcttctataggatccacagggagggggcatcttaatatatgcgcatactaatcatc

SEQ ID NO: 1111 - RNA, 100 nt, synthetic construct
  source 1..100: mol_type = other RNA
gatattgtgacatatctctgcactcatcacctggttgatgcaaatcttctataggatccacagggagggggcattttaatatatgggcacactaatcatc

SEQ ID NO: 1112 - RNA, 100 nt, synthetic construct
  source 1..100: mol_type = other RNA
gatattgtgacatatctctgcactcatcacacaaaagatgcaaatcttctatccatgacacagggagggggcattttaacatagtacgcaactaatcatc

SEQ ID NO: 1113 - RNA, 100 nt, synthetic construct
  source 1..100: mol_type = other RNA
gatattgtgacatatctctgcactcatcacacaaaagatgcaaatcttctatttttgacacagggagggggcatttcaatataagagccaactaatcatc

SEQ ID NO: 1114 - RNA, 100 nt, synthetic construct
  source 1..100: mol_type = other RNA
gatattgtgacatatctctgcactcatcacacaaaagatgcaaatcttctatccatggcacagggagggggcattctaatataagcaccaactaatcatc

SEQ ID NO: 1115 - RNA, 100 nt, synthetic construct
  source 1..100: mol_type = other RNA
gatattgtgacatatctctgcactcatcacacaaaagatgcaaatcttctattcttggcacagggagggggcatcttaatataagcagcaactaatcatc

SEQ ID NO: 1116 - RNA, 100 nt, synthetic construct
  source 1..100: mol_type = other RNA
gatattgtgacatatctctgcactcatcacacaaaagatgcaaatcttctatccccagcacagggagggggcattttaatatacgaaacaactaatcatc

SEQ ID NO: 1117 - RNA, 100 nt, synthetic construct
  source 1..100: mol_type = other RNA
gatattgtgacatatctctgcactcatcacacaaaagatgcaaatcttctacctttcccacagggagggggcattttaacatagtaatcaactaatcatc

SEQ ID NO: 1118 - RNA, 100 nt, synthetic construct
  source 1..100: mol_type = other RNA
gatattgtgacatatctctgcactcatcacacaaaagatgcaaatcttctacgaaacccacagggagggggcatttcaatatacagagaaactaatcatc

SEQ ID NO: 1119 - RNA, 100 nt, synthetic construct
  source 1..100: mol_type = other RNA
gatattgtgacatatctctgcactcatcacacaaaagatgcaaatcttctactcgtaccacagggagggggcattctaatataaacggaaactaatcatc

SEQ ID NO: 1120 - RNA, 100 nt, synthetic construct
  source 1..100: mol_type = other RNA
gatattgtgacatatctctgcactcatcacacaaaagatgcaaatcttctaacaacaccacagggagggggcatcttaatataagcagtaactaatcatc

SEQ ID NO: 1121 - RNA, 100 nt, synthetic construct
  source 1..100: mol_type = other RNA
gatattgtgacatatctctgcactcatcacacaaaagatgcaaatcttctactctcgccacagggagggggcattttaatatagaggtaaactaatcatc

SEQ ID NO: 1122 - RNA, 100 nt, synthetic construct
  source 1..100: mol_type = other RNA
gatattgtgacatatctctgcactcatcacacaaaagatgcaaatcttcttacatttccacagggagggggcattttaacatagaggtaaactaatcatc

SEQ ID NO: 1123 - RNA, 100 nt, synthetic construct
  source 1..100: mol_type = other RNA
gatattgtgacatatctctgcactcatcacacaaaagatgcaaatcttcttaatcctccacagggagggggcatttcaatatagcaggaaactaatcatc

SEQ ID NO: 1124 - RNA, 100 nt, synthetic construct
  source 1..100: mol_type = other RNA
gatattgtgacatatctctgcactcatcacacaaaagatgcaaatcttctcagaattccacagggagggggcattctaatataaacgtcaactaatcatc

SEQ ID NO: 1125 - RNA, 100 nt, synthetic construct
  source 1..100: mol_type = other RNA
gatattgtgacatatctctgcactcatcacacaaaagatgcaaatcttctccgttctccacagggagggggcatcttaatataggcgttaactaatcatc

SEQ ID NO: 1126 - RNA, 100 nt, synthetic construct
  source 1..100: mol_type = other RNA
gatattgtgacatatctctgcactcatcacacaaaagatgcaaatcttctccctcttccacagggagggggcattttaatataaggagtaactaatcatc

SEQ ID NO: 1127 - RNA, 100 nt, synthetic construct
  source 1..100: mol_type = other RNA
gatattgtgacatatctctgcactcatcacacaaaagatgcaaatcttcagattcatccacagggagggggcattttaacatacggacaaactaatcatc

SEQ ID NO: 1128 - RNA, 100 nt, synthetic construct
  source 1..100: mol_type = other RNA
gatattgtgacatatctctgcactcatcacacaaaagatgcaaatcttcactcctatccacagggagggggcatttcaatataaggaataactaatcatc

SEQ ID NO: 1129 - RNA, 100 nt, synthetic construct
  source 1..100: mol_type = other RNA
gatattgtgacatatctctgcactcatcacacaaaagatgcaaatcttcgtcgatatccacagggagggggcattctaatatagtacgcaactaatcatc

SEQ ID NO: 1130 - RNA, 100 nt, synthetic construct
  source 1..100: mol_type = other RNA
gatattgtgacatatctctgcactcatcacacaaaagatgcaaatcttcacgtcaatccacagggagggggcatcttaatataaggagtaactaatcatc

SEQ ID NO: 1131 - RNA, 100 nt, synthetic construct
  source 1..100: mol_type = other RNA
gatattgtgacatatctctgcactcatcacacaaaagatgcaaatcttcccactcatccacagggagggggcattttaatatagacagcaactaatcatc

SEQ ID NO: 1132 - RNA, 100 nt, synthetic construct
  source 1..100: mol_type = other RNA
gatattgtgacatatctctgcactcatcacacaaaagatgcaaatcttgctcctgatccacagggagggggcattttaacatagaaaaaaactaatcatc

SEQ ID NO: 1133 - RNA, 100 nt, synthetic construct
  source 1..100: mol_type = other RNA
gatattgtgacatatctctgcactcatcacacaaaagatgcaaatcttaatcgagatccacagggagggggcatttcaatatacggaccaactaatcatc

SEQ ID NO: 1134 - RNA, 100 nt, synthetic construct
  source 1..100: mol_type = other RNA
gatattgtgacatatctctgcactcatcacacaaaagatgcaaatcttgcggttgatccacagggagggggcattctaatataggtgcaaactaatcatc

SEQ ID NO: 1135 - RNA, 100 nt, synthetic construct
  source 1..100: mol_type = other RNA
gatattgtgacatatctctgcactcatcacacaaaagatgcaaatcttaaaatagatccacagggagggggcatcttaatataaagggcaactaatcatc

SEQ ID NO: 1136 - RNA, 100 nt, synthetic construct
  source 1..100: mol_type = other RNA
gatattgtgacatatctctgcactcatcacacaaaagatgcaaatcttggcctcgatccacagggagggggcattttaatataagaagaaactaatcatc

SEQ ID NO: 1137 - RNA, 100 nt, synthetic construct
  source 1..100: mol_type = other RNA
gatattgtgacatatctctgcactcatcacacaaaagatgcaaatctataactggatccacagggagggggcattttaacataaccaccaactaatcatc

SEQ ID NO: 1138 - RNA, 100 nt, synthetic construct
  source 1..100: mol_type = other RNA
gatattgtgacatatctctgcactcatcacacaaaagatgcaaatctcagcatggatccacagggagggggcatttcaatatacgccacaactaatcatc

SEQ ID NO: 1139 - RNA, 100 nt, synthetic construct
  source 1..100: mol_type = other RNA
gatattgtgacatatctctgcactcatcacacaaaagatgcaaatctgacggcggatccacagggagggggcattctaatatacacataaactaatcatc

SEQ ID NO: 1140 - RNA, 100 nt, synthetic construct
  source 1..100: mol_type = other RNA
gatattgtgacatatctctgcactcatcacacaaaagatgcaaatctagcgatggatccacagggagggggcatcttaatatagtagacaactaatcatc

SEQ ID NO: 1141 - RNA, 100 nt, synthetic construct
  source 1..100: mol_type = other RNA
gatattgtgacatatctctgcactcatcacacaaaagatgcaaatctgagtccggatccacagggagggggcattttaatataatgggtaactaatcatc

SEQ ID NO: 1142 - RNA, 100 nt, synthetic construct
  source 1..100: mol_type = other RNA
gatattgtgacatatctctgcactcatcacacaaaagatgcaaatcgcgacgaggatccacagggagggggcattttaacataggagtcaactaatcatc

SEQ ID NO: 1143 - RNA, 100 nt, synthetic construct
  source 1..100: mol_type = other RNA
gatattgtgacatatctctgcactcatcacacaaaagatgcaaatcccagggaggatccacagggagggggcatttcaatataagcaccaactaatcatc

SEQ ID NO: 1144 - RNA, 100 nt, synthetic construct
  source 1..100: mol_type = other RNA
gatattgtgacatatctctgcactcatcacacaaaagatgcaaatcaacaagaggatccacagggagggggcattctaatataatgaccaactaatcatc

SEQ ID NO: 1145 - RNA, 100 nt, synthetic construct
  source 1..100: mol_type = other RNA
gatattgtgacatatctctgcactcatcacacaaaagatgcaaatcgtaccgaggatccacagggagggggcatcttaatatagagtataactaatcatc

SEQ ID NO: 1146 - RNA, 100 nt, synthetic construct
  source 1..100: mol_type = other RNA
gatattgtgacatatctctgcactcatcacacaaaagatgcaaatcggtcagaggatccacagggagggggcattttaatataggccgcaactaatcatc

SEQ ID NO: 1147 - RNA, 100 nt, synthetic construct
  source 1..100: mol_type = other RNA
gatattgtgacatatctctgcactcatcacacaaaagatgcaaatgcatcctaggatccacagggagggggcattttaacatacgggtcaactaatcatc

SEQ ID NO: 1148 - RNA, 100 nt, synthetic construct
  source 1..100: mol_type = other RNA
gatattgtgacatatctctgcactcatcacacaaaagatgcaaatagattctaggatccacagggagggggcatttcaatataaaaagtaactaatcatc

SEQ ID NO: 1149 - RNA, 100 nt, synthetic construct
  source 1..100: mol_type = other RNA
gatattgtgacatatctctgcactcatcacacaaaagatgcaaatgaggcctaggatccacagggagggggcattctaatatacggaataactaatcatc

SEQ ID NO: 1150 - RNA, 100 nt, synthetic construct
  source 1..100: mol_type = other RNA
gatattgtgacatatctctgcactcatcacacaaaagatgcaaataaaagttaggatccacagggagggggcatcttaatatagggagcaactaatcatc

SEQ ID NO: 1151 - RNA, 100 nt, synthetic construct
  source 1..100: mol_type = other RNA
gatattgtgacatatctctgcactcatcacacaaaagatgcaaatgacagttaggatccacagggagggggcattttaatatagacgtcaactaatcatc

SEQ ID NO: 1152 - RNA, 100 nt, synthetic construct
  source 1..100: mol_type = other RNA
gatattgtgacatatctctgcactcatcacacaaaagatgcaaacaacggataggatccacagggagggggcattttaacataatgggaaactaatcatc

SEQ ID NO: 1153 - RNA, 100 nt, synthetic construct
  source 1..100: mol_type = other RNA
gatattgtgacatatctctgcactcatcacacaaaagatgcaaaaaccgaataggatccacagggagggggcatttcaatataccaggtaactaatcatc

SEQ ID NO: 1154 - RNA, 100 nt, synthetic construct
  source 1..100: mol_type = other RNA
gatattgtgacatatctctgcactcatcacacaaaagatgcaaaaacgacataggatccacagggagggggcattctaatatagaaaccaactaatcatc

SEQ ID NO: 1155 - RNA, 100 nt, synthetic construct
  source 1..100: mol_type = other RNA
gatattgtgacatatctctgcactcatcacacaaaagatgcaaaatgcacataggatccacagggagggggcatcttaatataatataaaactaatcatc

SEQ ID NO: 1156 - RNA, 100 nt, synthetic construct
  source 1..100: mol_type = other RNA
gatattgtgacatatctctgcactcatcacacaaaagatgcaaaggccggataggatccacagggagggggcattttaatataagcagaaactaatcatc

SEQ ID NO: 1157 - RNA, 100 nt, synthetic construct
  source 1..100: mol_type = other RNA
gatattgtgacatatctctgcactcatcacacaaaagatgcaacgaaagtataggatccacagggagggggcattttaacatagccgcaaactaatcatc

SEQ ID NO: 1158 - RNA, 100 nt, synthetic construct
  source 1..100: mol_type = other RNA
gatattgtgacatatctctgcactcatcacacaaaagatgcaataatggtataggatccacagggagggggcatttcaatatagcacataactaatcatc

SEQ ID NO: 1159 - RNA, 100 nt, synthetic construct
  source 1..100: mol_type = other RNA
gatattgtgacatatctctgcactcatcacacaaaagatgcaacacatatataggatccacagggagggggcattctaatataagcaataactaatcatc

SEQ ID NO: 1160 - RNA, 100 nt, synthetic construct
  source 1..100: mol_type = other RNA
gatattgtgacatatctctgcactcatcacacaaaagatgcaattgctatataggatccacagggagggggcatcttaatatagaagacaactaatcatc

SEQ ID NO: 1161 - RNA, 100 nt, synthetic construct
  source 1..100: mol_type = other RNA
gatattgtgacatatctctgcactcatcacacaaaagatgcaacaattatataggatccacagggagggggcattttaatataggcgccaactaatcatc

SEQ ID NO: 1162 - RNA, 100 nt, synthetic construct
  source 1..100: mol_type = other RNA
gatattgtgacatatctctgcactcatcacacaaaagatgcatcgagcctataggatccacagggagggggcattttaacataaaggttaactaatcatc

SEQ ID NO: 1163 - RNA, 100 nt, synthetic construct
  source 1..100: mol_type = other RNA
gatattgtgacatatctctgcactcatcacacaaaagatgcacccagcctataggatccacagggagggggcatttcaatataatgagaaactaatcatc

SEQ ID NO: 1164 - RNA, 100 nt, synthetic construct
  source 1..100: mol_type = other RNA
gatattgtgacatatctctgcactcatcacacaaaagatgcactcacactataggatccacagggagggggcattctaatataggtgcaaactaatcatc

SEQ ID NO: 1165 - RNA, 100 nt, synthetic construct
  source 1..100: mol_type = other RNA
gatattgtgacatatctctgcactcatcacacaaaagatgcactgggcctataggatccacagggagggggcatcttaatataggcaccaactaatcatc

SEQ ID NO: 1166 - RNA, 100 nt, synthetic construct
  source 1..100: mol_type = other RNA
gatattgtgacatatctctgcactcatcacacaaaagatgcacccggactataggatccacagggagggggcattttaatataatacacaactaatcatc

SEQ ID NO: 1167 - RNA, 100 nt, synthetic construct
  source 1..100: mol_type = other RNA
gatattgtgacatatctctgcactcatcacacaaaagatgctcaggctctataggatccacagggagggggcattttaacataaaagccaactaatcatc

SEQ ID NO: 1168 - RNA, 100 nt, synthetic construct
  source 1..100: mol_type = other RNA
gatattgtgacatatctctgcactcatcacacaaaagatgccgcggatctataggatccacagggagggggcatttcaatatagtagtcaactaatcatc

SEQ ID NO: 1169 - RNA, 100 nt, synthetic construct
  source 1..100: mol_type = other RNA
gatattgtgacatatctctgcactcatcacacaaaagatgcctggcgtctataggatccacagggagggggcattctaatatacgaaataactaatcatc

SEQ ID NO: 1170 - RNA, 100 nt, synthetic construct
  source 1..100: mol_type = other RNA
gatattgtgacatatctctgcactcatcacacaaaagatgcctgcggtctataggatccacagggagggggcatcttaatataagggaaaactaatcatc

SEQ ID NO: 1171 - RNA, 100 nt, synthetic construct
  source 1..100: mol_type = other RNA
gatattgtgacatatctctgcactcatcacacaaaagatgccccgaatctataggatccacagggagggggcattttaatatacccaaaaactaatcatc

SEQ ID NO: 1172 - RNA, 100 nt, synthetic construct
  source 1..100: mol_type = other RNA
gatattgtgacatatctctgcactcatcacacaaaagatgacgccgttctataggatccacagggagggggcattttaacatagaggataactaatcatc

SEQ ID NO: 1173 - RNA, 100 nt, synthetic construct
  source 1..100: mol_type = other RNA
gatattgtgacatatctctgcactcatcacacaaaagatgaatacgttctataggatccacagggagggggcatttcaatataagcgttaactaatcatc

SEQ ID NO: 1174 - RNA, 100 nt, synthetic construct
  source 1..100: mol_type = other RNA
gatattgtgacatatctctgcactcatcacacaaaagatggttcagttctataggatccacagggagggggcattctaatataatgggaaactaatcatc

SEQ ID NO: 1175 - RNA, 100 nt, synthetic construct
  source 1..100: mol_type = other RNA
gatattgtgacatatctctgcactcatcacacaaaagatggtaccattctataggatccacagggagggggcatcttaatataggagccaactaatcatc

SEQ ID NO: 1176 - RNA, 100 nt, synthetic construct
  source 1..100: mol_type = other RNA
gatattgtgacatatctctgcactcatcacacaaaagatggttgagttctataggatccacagggagggggcattttaatatagacggcaactaatcatc

SEQ ID NO: 1177 - RNA, 100 nt, synthetic construct
  source 1..100: mol_type = other RNA
gatattgtgacatatctctgcactcatcacacaaaagataactcacttctataggatccacagggagggggcattttaacatagagtataactaatcatc

SEQ ID NO: 1178 - RNA, 100 nt, synthetic construct
  source 1..100: mol_type = other RNA
gatattgtgacatatctctgcactcatcacacaaaagattgaccacttctataggatccacagggagggggcatttcaatataaaccgcaactaatcatc

SEQ ID NO: 1179 - RNA, 100 nt, synthetic construct
  source 1..100: mol_type = other RNA
gatattgtgacatatctctgcactcatcacacaaaagatcttacgcttctataggatccacagggagggggcattctaatatacgcacaaactaatcatc

SEQ ID NO: 1180 - RNA, 100 nt, synthetic construct
  source 1..100: mol_type = other RNA
gatattgtgacatatctctgcactcatcacacaaaagatttaccacttctataggatccacagggagggggcatcttaatatacggacaaactaatcatc

SEQ ID NO: 1181 - RNA, 100 nt, synthetic construct
  source 1..100: mol_type = other RNA
gatattgtgacatatctctgcactcatcacacaaaagatctccaccttctataggatccacagggagggggcattttaatataaacaccaactaatcatc

SEQ ID NO: 1182 - RNA, 100 nt, synthetic construct
  source 1..100: mol_type = other RNA
gatattgtgacatatctctgcactcatcacacaaaagagaggcttcttctataggatccacagggagggggcattttaacatacaggacaactaatcatc

SEQ ID NO: 1183 - RNA, 100 nt, synthetic construct
  source 1..100: mol_type = other RNA
gatattgtgacatatctctgcactcatcacacaaaagagaatcctcttctataggatccacagggagggggcatttcaatataatggccaactaatcatc

SEQ ID NO: 1184 - RNA, 100 nt, synthetic construct
  source 1..100: mol_type = other RNA
gatattgtgacatatctctgcactcatcacacaaaagaaagtcctcttctataggatccacagggagggggcattctaatatagcagcaaactaatcatc

SEQ ID NO: 1185 - RNA, 100 nt, synthetic construct
  source 1..100: mol_type = other RNA
gatattgtgacatatctctgcactcatcacacaaaagagacctctcttctataggatccacagggagggggcatcttaatataaaggtcaactaatcatc

SEQ ID NO: 1186 - RNA, 100 nt, synthetic construct
  source 1..100: mol_type = other RNA
gatattgtgacatatctctgcactcatcacacaaaagcaatacatcttctataggatccacagggagggggcattttaacatagcggtcaactaatcatc

SEQ ID NO: 1187 - RNA, 100 nt, synthetic construct
  source 1..100: mol_type = other RNA
gatattgtgacatatctctgcactcatcacacaaaagcatatcatcttctataggatccacagggagggggcatttcaatataaacagaaactaatcatc

SEQ ID NO: 1188 - RNA, 100 nt, synthetic construct
  source 1..100: mol_type = other RNA
gatattgtgacatatctctgcactcatcacacaaaagctagatatcttctataggatccacagggagggggcattctaatatacacccaaactaatcatc

SEQ ID NO: 1189 - RNA, 100 nt, synthetic construct
  source 1..100: mol_type = other RNA
gatattgtgacatatctctgcactcatcacacaaaagtcagttatcttctataggatccacagggagggggcatcttaatataatagataactaatcatc

SEQ ID NO: 1190 - RNA, 100 nt, synthetic construct
  source 1..100: mol_type = other RNA
gatattgtgacatatctctgcactcatcacacaaaagctaggtatcttctataggatccacagggagggggcattttaatatacgagccaactaatcatc

SEQ ID NO: 1191 - RNA, 100 nt, synthetic construct
  source 1..100: mol_type = other RNA
gatattgtgacatatctctgcactcatcacacaaaatccaataatcttctataggatccacagggagggggcattttaacatagtattcaactaatcatc

SEQ ID NO: 1192 - RNA, 100 nt, synthetic construct
  source 1..100: mol_type = other RNA
gatattgtgacatatctctgcactcatcacacaaaacggaccaatcttctataggatccacagggagggggcatttcaatataccaaacaactaatcatc

SEQ ID NO: 1193 - RNA, 100 nt, synthetic construct
  source 1..100: mol_type = other RNA
gatattgtgacatatctctgcactcatcacacaaaaccccctaatcttctataggatccacagggagggggcattctaatatacgggcaaactaatcatc

SEQ ID NO: 1194 - RNA, 100 nt, synthetic construct
  source 1..100: mol_type = other RNA
gatattgtgacatatctctgcactcatcacacaaaaccgtttaatcttctataggatccacagggagggggcatcttaatatacggtataactaatcatc

SEQ ID NO: 1195 - RNA, 100 nt, synthetic construct
  source 1..100: mol_type = other RNA
gatattgtgacatatctctgcactcatcacacaaaacaacctaatcttctataggatccacagggagggggcattttaatataatagacaactaatcatc

SEQ ID NO: 1196 - RNA, 100 nt, synthetic construct
  source 1..100: mol_type = other RNA
gatattgtgacatatctctgcactcatcacacaaacccccgaaatcttctataggatccacagggagggggcattttaacataagcacaaactaatcatc

SEQ ID NO: 1197 - RNA, 100 nt, synthetic construct
  source 1..100: mol_type = other RNA
gatattgtgacatatctctgcactcatcacacaaaccgcagaaatcttctataggatccacagggagggggcatttcaatataaaagtaaactaatcatc

SEQ ID NO: 1198 - RNA, 100 nt, synthetic construct
  source 1..100: mol_type = other RNA
gatattgtgacatatctctgcactcatcacacaaacccaaaaaatcttctataggatccacagggagggggcattctaatatagccgcaaactaatcatc

SEQ ID NO: 1199 - RNA, 100 nt, synthetic construct
  source 1..100: mol_type = other RNA
gatattgtgacatatctctgcactcatcacacaaaccacaaaaatcttctataggatccacagggagggggcatcttaatatagaacgcaactaatcatc

SEQ ID NO: 1200 - RNA, 100 nt, synthetic construct
  source 1..100: mol_type = other RNA
gatattgtgacatatctctgcactcatcacacaaatttgagaaatcttctataggatccacagggagggggcattttaatatagcaaccaactaatcatc

SEQ ID NO: 1201 - RNA, 100 nt, synthetic construct
  source 1..100: mol_type = other RNA
gatattgtgacatatctctgcactcatcacacaacctaatcaaatcttctataggatccacagggagggggcattttaacatagaagttaactaatcatc

SEQ ID NO: 1202 - RNA, 100 nt, synthetic construct
  source 1..100: mol_type = other RNA
gatattgtgacatatctctgcactcatcacacaacacgctcaaatcttctataggatccacagggagggggcatttcaatataagagaaaactaatcatc

SEQ ID NO: 1203 - RNA, 100 nt, synthetic construct
  source 1..100: mol_type = other RNA
gatattgtgacatatctctgcactcatcacacaacacgcccaaatcttctataggatccacagggagggggcattctaatataccagacaactaatcatc

SEQ ID NO: 1204 - RNA, 100 nt, synthetic construct
  source 1..100: mol_type = other RNA
gatattgtgacatatctctgcactcatcacacaacatagccaaatcttctataggatccacagggagggggcatcttaatatacggtaaaactaatcatc

SEQ ID NO: 1205 - RNA, 100 nt, synthetic construct
  source 1..100: mol_type = other RNA
gatattgtgacatatctctgcactcatcacacaactactccaaatcttctataggatccacagggagggggcattttaatatagtggccaactaatcatc

SEQ ID NO: 1206 - RNA, 100 nt, synthetic construct
  source 1..100: mol_type = other RNA
gatattgtgacatatctctgcactcatcacacaccattcgcaaatcttctataggatccacagggagggggcattttaacatagggagtaactaatcatc

SEQ ID NO: 1207 - RNA, 100 nt, synthetic construct
  source 1..100: mol_type = other RNA
gatattgtgacatatctctgcactcatcacacatgtacggcaaatcttctataggatccacagggagggggcatttcaatatacagggcaactaatcatc

SEQ ID NO: 1208 - RNA, 100 nt, synthetic construct
  source 1..100: mol_type = other RNA
gatattgtgacatatctctgcactcatcacacattaatggcaaatcttctataggatccacagggagggggcattctaatatagagaccaactaatcatc

SEQ ID NO: 1209 - RNA, 100 nt, synthetic construct
  source 1..100: mol_type = other RNA
gatattgtgacatatctctgcactcatcacacaccataggcaaatcttctataggatccacagggagggggcatcttaatataggagacaactaatcatc

SEQ ID NO: 1210 - RNA, 100 nt, synthetic construct
  source 1..100: mol_type = other RNA
gatattgtgacatatctctgcactcatcacacactgccagcaaatcttctataggatccacagggagggggcattttaatatacaacgcaactaatcatc

SEQ ID NO: 1211 - RNA, 100 nt, synthetic construct
  source 1..100: mol_type = other RNA
gatattgtgacatatctctgcactcatcacaccccctctgcaaatcttctataggatccacagggagggggcattttaacataacaggcaactaatcatc

SEQ ID NO: 1212 - RNA, 100 nt, synthetic construct
  source 1..100: mol_type = other RNA
gatattgtgacatatctctgcactcatcacactcgtcctgcaaatcttctataggatccacagggagggggcatttcaatatagacattaactaatcatc

SEQ ID NO: 1213 - RNA, 100 nt, synthetic construct
  source 1..100: mol_type = other RNA
gatattgtgacatatctctgcactcatcacacctacactgcaaatcttctataggatccacagggagggggcattctaatatagggagtaactaatcatc

SEQ ID NO: 1214 - RNA, 100 nt, synthetic construct
  source 1..100: mol_type = other RNA
gatattgtgacatatctctgcactcatcacactcttactgcaaatcttctataggatccacagggagggggcatcttaatatagccacaaactaatcatc

SEQ ID NO: 1215 - RNA, 100 nt, synthetic construct
  source 1..100: mol_type = other RNA
gatattgtgacatatctctgcactcatcacacctctcttgcaaatcttctataggatccacagggagggggcattttaatatagtagcaaactaatcatc

SEQ ID NO: 1216 - RNA, 100 nt, synthetic construct
  source 1..100: mol_type = other RNA
gatattgtgacatatctctgcactcatcacagtaaccatgcaaatcttctataggatccacagggagggggcattttaacatagtaggtaactaatcatc

SEQ ID NO: 1217 - RNA, 100 nt, synthetic construct
  source 1..100: mol_type = other RNA
gatattgtgacatatctctgcactcatcacaaacttaatgcaaatcttctataggatccacagggagggggcatttcaatatagtggaaaactaatcatc

SEQ ID NO: 1218 - RNA, 100 nt, synthetic construct
  source 1..100: mol_type = other RNA
gatattgtgacatatctctgcactcatcacaactcatatgcaaatcttctataggatccacagggagggggcattctaatataaggaccaactaatcatc

SEQ ID NO: 1219 - RNA, 100 nt, synthetic construct
  source 1..100: mol_type = other RNA
gatattgtgacatatctctgcactcatcacagctatcatgcaaatcttctataggatccacagggagggggcatcttaatatagaaggaaactaatcatc

SEQ ID NO: 1220 - RNA, 100 nt, synthetic construct
  source 1..100: mol_type = other RNA
gatattgtgacatatctctgcactcatcacaagtgctatgcaaatcttctataggatccacagggagggggcattttaatatagggagcaactaatcatc

SEQ ID NO: 1221 - RNA, 100 nt, synthetic construct
  source 1..100: mol_type = other RNA
gatattgtgacatatctctgcactcatcacttcttcgatgcaaatcttctataggatccacagggagggggcattttaacataaacacaaactaatcatc

SEQ ID NO: 1222 - RNA, 100 nt, synthetic construct
  source 1..100: mol_type = other RNA
gatattgtgacatatctctgcactcatcacttggccgatgcaaatcttctataggatccacagggagggggcatttcaatatagcccataactaatcatc

SEQ ID NO: 1223 - RNA, 100 nt, synthetic construct
  source 1..100: mol_type = other RNA
gatattgtgacatatctctgcactcatcactggtccgatgcaaatcttctataggatccacagggagggggcattctaatatagcacataactaatcatc

SEQ ID NO: 1224 - RNA, 100 nt, synthetic construct
  source 1..100: mol_type = other RNA
gatattgtgacatatctctgcactcatcacctttatgatgcaaatcttctataggatccacagggagggggcatcttaatatacagataaactaatcatc

SEQ ID NO: 1225 - RNA, 100 nt, synthetic construct
  source 1..100: mol_type = other RNA
gatattgtgacatatctctgcactcatcaccttgttgatgcaaatcttctataggatccacagggagggggcattttaatatacccaaaaactaatcatc

SEQ ID NO: 1226 - RNA, 100 nt, synthetic construct
  source 1..100: mol_type = other RNA
gatattgtgacatatctctgcactcatcacacaaaagatgcaaatcttctaagcctaccacagggagggggcattttaacattggggggaactaatcatc

SEQ ID NO: 1227 - RNA, 100 nt, synthetic construct
  source 1..100: mol_type = other RNA
gatattgtgacatatctctgcactcatcacacaaaagatgcaaatcttctaactcacccacagggagggggcatttcaatatcagaaggaactaatcatc

SEQ ID NO: 1228 - RNA, 100 nt, synthetic construct
  source 1..100: mol_type = other RNA
gatattgtgacatatctctgcactcatcacacaaaagatgcaaatcttctacccacaccacagggagggggcattctaatattcatacgaactaatcatc

SEQ ID NO: 1229 - RNA, 100 nt, synthetic construct
  source 1..100: mol_type = other RNA
gatattgtgacatatctctgcactcatcacacaaaagatgcaaatcttctagccgcgccacagggagggggcatcttaatattcacccgaactaatcatc

SEQ ID NO: 1230 - RNA, 100 nt, synthetic construct
  source 1..100: mol_type = other RNA
gatattgtgacatatctctgcactcatcacacaaaagatgcaaatcttctagaaatgccacagggagggggcattttaatattgtggcgaactaatcatc

SEQ ID NO: 1231 - RNA, 100 nt, synthetic construct
  source 1..100: mol_type = other RNA
gatattgtgacatatctctgcactcatcacacaaaagatgcaaatcttctccttcttccacagggagggggcattttaacattagaaagaactaatcatc

SEQ ID NO: 1232 - RNA, 100 nt, synthetic construct
  source 1..100: mol_type = other RNA
gatattgtgacatatctctgcactcatcacacaaaagatgcaaatcttcttatacctccacagggagggggcatttcaatattaccaggaactaatcatc

SEQ ID NO: 1233 - RNA, 100 nt, synthetic construct
  source 1..100: mol_type = other RNA
gatattgtgacatatctctgcactcatcacacaaaagatgcaaatcttcttttatttccacagggagggggcattctaatatcatggagaactaatcatc

SEQ ID NO: 1234 - RNA, 100 nt, synthetic construct
  source 1..100: mol_type = other RNA
gatattgtgacatatctctgcactcatcacacaaaagatgcaaatcttcttgcaattccacagggagggggcatcttaatatttgggggaactaatcatc

SEQ ID NO: 1235 - RNA, 100 nt, synthetic construct
  source 1..100: mol_type = other RNA
gatattgtgacatatctctgcactcatcacacaaaagatgcaaatcttccgagtcatccacagggagggggcattttaacattgaggggaactaatcatc

SEQ ID NO: 1236 - RNA, 100 nt, synthetic construct
  source 1..100: mol_type = other RNA
gatattgtgacatatctctgcactcatcacacaaaagatgcaaatcttcctcgttatccacagggagggggcatttcaatatcggaaggaactaatcatc

SEQ ID NO: 1237 - RNA, 100 nt, synthetic construct
  source 1..100: mol_type = other RNA
gatattgtgacatatctctgcactcatcacacaaaagatgcaaatcttcacaaatatccacagggagggggcattctaatatttggaagaactaatcatc

SEQ ID NO: 1238 - RNA, 100 nt, synthetic construct
  source 1..100: mol_type = other RNA
gatattgtgacatatctctgcactcatcacacaaaagatgcaaatcttcagaataatccacagggagggggcatcttaatatcctacggaactaatcatc

SEQ ID NO: 1239 - RNA, 100 nt, synthetic construct
  source 1..100: mol_type = other RNA
gatattgtgacatatctctgcactcatcacacaaaagatgcaaatcttcacaactatccacagggagggggcattttaatattaagtagaactaatcatc

SEQ ID NO: 1240 - RNA, 100 nt, synthetic construct
  source 1..100: mol_type = other RNA
gatattgtgacatatctctgcactcatcacacaaaagatgcaaatcttaaccacgatccacagggagggggcatttcaatatcatatagaactaatcatc

SEQ ID NO: 1241 - RNA, 100 nt, synthetic construct
  source 1..100: mol_type = other RNA
gatattgtgacatatctctgcactcatcacacaaaagatgcaaatcttaaggcagatccacagggagggggcattctaatattagtacgaactaatcatc

SEQ ID NO: 1242 - RNA, 100 nt, synthetic construct
  source 1..100: mol_type = other RNA
gatattgtgacatatctctgcactcatcacacaaaagatgcaaatcttgcccgagatccacagggagggggcatcttaatattaaagggaactaatcatc

SEQ ID NO: 1243 - RNA, 100 nt, synthetic construct
  source 1..100: mol_type = other RNA
gatattgtgacatatctctgcactcatcacacaaaagatgcaaatcttatcttagatccacagggagggggcattttaatattccatagaactaatcatc

SEQ ID NO: 1244 - RNA, 100 nt, synthetic construct
  source 1..100: mol_type = other RNA
gatattgtgacatatctctgcactcatcacacaaaagatgcaaatctccccccggatccacagggagggggcattttaacattaaatggaactaatcatc

SEQ ID NO: 1245 - RNA, 100 nt, synthetic construct
  source 1..100: mol_type = other RNA
gatattgtgacatatctctgcactcatcacacaaaagatgcaaatctgggactggatccacagggagggggcatttcaatatttgggcgaactaatcatc

SEQ ID NO: 1246 - RNA, 100 nt, synthetic construct
  source 1..100: mol_type = other RNA
gatattgtgacatatctctgcactcatcacacaaaagatgcaaatctgtatttggatccacagggagggggcattctaatatttaagagaactaatcatc

SEQ ID NO: 1247 - RNA, 100 nt, synthetic construct
  source 1..100: mol_type = other RNA
gatattgtgacatatctctgcactcatcacacaaaagatgcaaatctccacccggatccacagggagggggcatcttaatatttggtagaactaatcatc

SEQ ID NO: 1248 - RNA, 100 nt, synthetic construct
  source 1..100: mol_type = other RNA
gatattgtgacatatctctgcactcatcacacaaaagatgcaaatctagcaccggatccacagggagggggcattttaatatccgcaagaactaatcatc

SEQ ID NO: 1249 - RNA, 100 nt, synthetic construct
  source 1..100: mol_type = other RNA
gatattgtgacatatctctgcactcatcacacaaaagatgcaaatcataccgaggatccacagggagggggcattttaacattccagggaactaatcatc

SEQ ID NO: 1250 - RNA, 100 nt, synthetic construct
  source 1..100: mol_type = other RNA
gatattgtgacatatctctgcactcatcacacaaaagatgcaaatcgaatcaaggatccacagggagggggcatttcaatattagcgcgaactaatcatc

SEQ ID NO: 1251 - RNA, 100 nt, synthetic construct
  source 1..100: mol_type = other RNA
gatattgtgacatatctctgcactcatcacacaaaagatgcaaatcggtcacaggatccacagggagggggcattctaatatccaccagaactaatcatc

SEQ ID NO: 1252 - RNA, 100 nt, synthetic construct
  source 1..100: mol_type = other RNA
gatattgtgacatatctctgcactcatcacacaaaagatgcaaatccatcagaggatccacagggagggggcatcttaatattttagggaactaatcatc

SEQ ID NO: 1253 - RNA, 100 nt, synthetic construct
  source 1..100: mol_type = other RNA
gatattgtgacatatctctgcactcatcacacaaaagatgcaaatccgacggaggatccacagggagggggcattttaatattcaggggaactaatcatc

SEQ ID NO: 1254 - RNA, 100 nt, synthetic construct
  source 1..100: mol_type = other RNA
gatattgtgacatatctctgcactcatcacacaaaagatgcaaatattagctaggatccacagggagggggcattttaacattaacaagaactaatcatc

SEQ ID NO: 1255 - RNA, 100 nt, synthetic construct
  source 1..100: mol_type = other RNA
gatattgtgacatatctctgcactcatcacacaaaagatgcaaataagagttaggatccacagggagggggcatttcaatatccgaacgaactaatcatc

SEQ ID NO: 1256 - RNA, 100 nt, synthetic construct
  source 1..100: mol_type = other RNA
gatattgtgacatatctctgcactcatcacacaaaagatgcaaatgccacctaggatccacagggagggggcattctaatattagggagaactaatcatc

SEQ ID NO: 1257 - RNA, 100 nt, synthetic construct
  source 1..100: mol_type = other RNA
gatattgtgacatatctctgcactcatcacacaaaagatgcaaataatacttaggatccacagggagggggcatcttaatattagcgagaactaatcatc

SEQ ID NO: 1258 - RNA, 100 nt, synthetic construct
  source 1..100: mol_type = other RNA
gatattgtgacatatctctgcactcatcacacaaaagatgcaaatgacgtttaggatccacagggagggggcattttaatatcaaggagaactaatcatc

SEQ ID NO: 1259 - RNA, 100 nt, synthetic construct
  source 1..100: mol_type = other RNA
gatattgtgacatatctctgcactcatcacacaaaagatgcaaacatatgataggatccacagggagggggcattttaacatttaatagaactaatcatc

SEQ ID NO: 1260 - RNA, 100 nt, synthetic construct
  source 1..100: mol_type = other RNA
gatattgtgacatatctctgcactcatcacacaaaagatgcaaaagtcaaataggatccacagggagggggcatttcaatatcctgcggaactaatcatc

SEQ ID NO: 1261 - RNA, 100 nt, synthetic construct
  source 1..100: mol_type = other RNA
gatattgtgacatatctctgcactcatcacacaaaagatgcaaaccccgcataggatccacagggagggggcattctaatatccgagagaactaatcatc

SEQ ID NO: 1262 - RNA, 100 nt, synthetic construct
  source 1..100: mol_type = other RNA
gatattgtgacatatctctgcactcatcacacaaaagatgcaaacacgaaataggatccacagggagggggcatcttaatatcaagtagaactaatcatc

SEQ ID NO: 1263 - RNA, 100 nt, synthetic construct
  source 1..100: mol_type = other RNA
gatattgtgacatatctctgcactcatcacacaaaagatgcaaagccagaataggatccacagggagggggcattttaatatcgagtggaactaatcatc

SEQ ID NO: 1264 - RNA, 100 nt, synthetic construct
  source 1..100: mol_type = other RNA
gatattgtgacatatctctgcactcatcacacaaaagatgcaatggggatataggatccacagggagggggcattttaacattggcgagaactaatcatc

SEQ ID NO: 1265 - RNA, 100 nt, synthetic construct
  source 1..100: mol_type = other RNA
gatattgtgacatatctctgcactcatcacacaaaagatgcaactggtatataggatccacagggagggggcatttcaatattaacgcgaactaatcatc

SEQ ID NO: 1266 - RNA, 100 nt, synthetic construct
  source 1..100: mol_type = other RNA
gatattgtgacatatctctgcactcatcacacaaaagatgcaacgggaatataggatccacagggagggggcattctaatatccaccagaactaatcatc

SEQ ID NO: 1267 - RNA, 100 nt, synthetic construct
  source 1..100: mol_type = other RNA
gatattgtgacatatctctgcactcatcacacaaaagatgcaatcaacgtataggatccacagggagggggcatcttaatatttgagagaactaatcatc

SEQ ID NO: 1268 - RNA, 100 nt, synthetic construct
  source 1..100: mol_type = other RNA
gatattgtgacatatctctgcactcatcacacaaaagatgcattgaccctataggatccacagggagggggcattttaacattagccggaactaatcatc

SEQ ID NO: 1269 - RNA, 100 nt, synthetic construct
  source 1..100: mol_type = other RNA
gatattgtgacatatctctgcactcatcacacaaaagatgcataaaacctataggatccacagggagggggcatttcaatatcgtatggaactaatcatc

SEQ ID NO: 1270 - RNA, 100 nt, synthetic construct
  source 1..100: mol_type = other RNA
gatattgtgacatatctctgcactcatcacacaaaagatgcattcatgctataggatccacagggagggggcattctaatattaaacagaactaatcatc

SEQ ID NO: 1271 - RNA, 100 nt, synthetic construct
  source 1..100: mol_type = other RNA
gatattgtgacatatctctgcactcatcacacaaaagatgcatgcagcctataggatccacagggagggggcatcttaatattgtatggaactaatcatc

SEQ ID NO: 1272 - RNA, 100 nt, synthetic construct
  source 1..100: mol_type = other RNA
gatattgtgacatatctctgcactcatcacacaaaagatgcattagggctataggatccacagggagggggcattttaatattcaggagaactaatcatc

SEQ ID NO: 1273 - RNA, 100 nt, synthetic construct
  source 1..100: mol_type = other RNA
gatattgtgacatatctctgcactcatcacacaaaagatgcccctactctataggatccacagggagggggcattttaacattgtagagaactaatcatc

SEQ ID NO: 1274 - RNA, 100 nt, synthetic construct
  source 1..100: mol_type = other RNA
gatattgtgacatatctctgcactcatcacacaaaagatgcttacaatctataggatccacagggagggggcatttcaatatcctgcggaactaatcatc

SEQ ID NO: 1275 - RNA, 100 nt, synthetic construct
  source 1..100: mol_type = other RNA
gatattgtgacatatctctgcactcatcacacaaaagatgctcgggctctataggatccacagggagggggcatcttaatattgaccggaactaatcatc

SEQ ID NO: 1276 - RNA, 100 nt, synthetic construct
  source 1..100: mol_type = other RNA
gatattgtgacatatctctgcactcatcacacaaaagatgcccaacctctataggatccacagggagggggcattttaatatcaatgggaactaatcatc

SEQ ID NO: 1277 - RNA, 100 nt, synthetic construct
  source 1..100: mol_type = other RNA
gatattgtgacatatctctgcactcatcacacaaaagatggtttagttctataggatccacagggagggggcattttaacattggcgggaactaatcatc

SEQ ID NO: 1278 - RNA, 100 nt, synthetic construct
  source 1..100: mol_type = other RNA
gatattgtgacatatctctgcactcatcacacaaaagatgactgcgttctataggatccacagggagggggcatttcaatattcagaagaactaatcatc

SEQ ID NO: 1279 - RNA, 100 nt, synthetic construct
  source 1..100: mol_type = other RNA
gatattgtgacatatctctgcactcatcacacaaaagatgatacggttctataggatccacagggagggggcattctaatatttgaaagaactaatcatc

SEQ ID NO: 1280 - RNA, 100 nt, synthetic construct
  source 1..100: mol_type = other RNA
gatattgtgacatatctctgcactcatcacacaaaagatggcgtgattctataggatccacagggagggggcatcttaatatccaatggaactaatcatc

SEQ ID NO: 1281 - RNA, 100 nt, synthetic construct
  source 1..100: mol_type = other RNA
gatattgtgacatatctctgcactcatcacacaaaagatgagtaaattctataggatccacagggagggggcattttaatatcgaacggaactaatcatc

SEQ ID NO: 1282 - RNA, 100 nt, synthetic construct
  source 1..100: mol_type = other RNA
gatattgtgacatatctctgcactcatcacacaaaagataatatacttctataggatccacagggagggggcattttaacattaggacgaactaatcatc

SEQ ID NO: 1283 - RNA, 100 nt, synthetic construct
  source 1..100: mol_type = other RNA
gatattgtgacatatctctgcactcatcacacaaaagatcttcgccttctataggatccacagggagggggcatttcaatatcatagggaactaatcatc

SEQ ID NO: 1284 - RNA, 100 nt, synthetic construct
  source 1..100: mol_type = other RNA
gatattgtgacatatctctgcactcatcacacaaaagatctccgccttctataggatccacagggagggggcattctaatatcagcgagaactaatcatc

SEQ ID NO: 1285 - RNA, 100 nt, synthetic construct
  source 1..100: mol_type = other RNA
gatattgtgacatatctctgcactcatcacacaaaagatattgtgcttctataggatccacagggagggggcatcttaatattcacaggaactaatcatc

SEQ ID NO: 1286 - RNA, 100 nt, synthetic construct
  source 1..100: mol_type = other RNA
gatattgtgacatatctctgcactcatcacacaaaagatctacaccttctataggatccacagggagggggcattttaatatcaggaggaactaatcatc

SEQ ID NO: 1287 - RNA, 100 nt, synthetic construct
  source 1..100: mol_type = other RNA
gatattgtgacatatctctgcactcatcacacaaaagagtctactcttctataggatccacagggagggggcattttaacattaagtagaactaatcatc

SEQ ID NO: 1288 - RNA, 100 nt, synthetic construct
  source 1..100: mol_type = other RNA
gatattgtgacatatctctgcactcatcacacaaaagagggtcctcttctataggatccacagggagggggcatttcaatatccaggggaactaatcatc

SEQ ID NO: 1289 - RNA, 100 nt, synthetic construct
  source 1..100: mol_type = other RNA
gatattgtgacatatctctgcactcatcacacaaaagacccctctcttctataggatccacagggagggggcattctaatattcaaacgaactaatcatc

SEQ ID NO: 1290 - RNA, 100 nt, synthetic construct
  source 1..100: mol_type = other RNA
gatattgtgacatatctctgcactcatcacacaaaagaacattctcttctataggatccacagggagggggcatcttaatatcacagcgaactaatcatc

SEQ ID NO: 1291 - RNA, 100 nt, synthetic construct
  source 1..100: mol_type = other RNA
gatattgtgacatatctctgcactcatcacacaaaagaaaaacctcttctataggatccacagggagggggcattttaatattggatggaactaatcatc

SEQ ID NO: 1292 - RNA, 100 nt, synthetic construct
  source 1..100: mol_type = other RNA
gatattgtgacatatctctgcactcatcacacaaaagtccgttatcttctataggatccacagggagggggcattttaacattacaacgaactaatcatc

SEQ ID NO: 1293 - RNA, 100 nt, synthetic construct
  source 1..100: mol_type = other RNA
gatattgtgacatatctctgcactcatcacacaaaagtacttcatcttctataggatccacagggagggggcatttcaatattggcacgaactaatcatc

SEQ ID NO: 1294 - RNA, 100 nt, synthetic construct
  source 1..100: mol_type = other RNA
gatattgtgacatatctctgcactcatcacacaaaagcaaattatcttctataggatccacagggagggggcattctaatattggggagaactaatcatc

SEQ ID NO: 1295 - RNA, 100 nt, synthetic construct
  source 1..100: mol_type = other RNA
gatattgtgacatatctctgcactcatcacacaaaagtaagatatcttctataggatccacagggagggggcatcttaatatccagtggaactaatcatc

SEQ ID NO: 1296 - RNA, 100 nt, synthetic construct
  source 1..100: mol_type = other RNA
gatattgtgacatatctctgcactcatcacacaaaagcgttttatcttctataggatccacagggagggggcattttaatattagtacgaactaatcatc

SEQ ID NO: 1297 - RNA, 100 nt, synthetic construct
  source 1..100: mol_type = other RNA
gatattgtgacatatctctgcactcatcacacaaaattattcaatcttctataggatccacagggagggggcattttaacattaacgagaactaatcatc

SEQ ID NO: 1298 - RNA, 100 nt, synthetic construct
  source 1..100: mol_type = other RNA
gatattgtgacatatctctgcactcatcacacaaaaatctccaatcttctataggatccacagggagggggcatttcaatatcaaggggaactaatcatc

SEQ ID NO: 1299 - RNA, 100 nt, synthetic construct
  source 1..100: mol_type = other RNA
gatattgtgacatatctctgcactcatcacacaaaactatctaatcttctataggatccacagggagggggcattctaatatttggacgaactaatcatc

SEQ ID NO: 1300 - RNA, 100 nt, synthetic construct
  source 1..100: mol_type = other RNA
gatattgtgacatatctctgcactcatcacacaaaacctagtaatcttctataggatccacagggagggggcatcttaatatttgagagaactaatcatc

SEQ ID NO: 1301 - RNA, 100 nt, synthetic construct
  source 1..100: mol_type = other RNA
gatattgtgacatatctctgcactcatcacacaaaacaacgtaatcttctataggatccacagggagggggcattttaatatcgagaagaactaatcatc

SEQ ID NO: 1302 - RNA, 100 nt, synthetic construct
  source 1..100: mol_type = other RNA
gatattgtgacatatctctgcactcatcacacaaacgcaaaaaatcttctataggatccacagggagggggcattttaacattgtaacgaactaatcatc

SEQ ID NO: 1303 - RNA, 100 nt, synthetic construct
  source 1..100: mol_type = other RNA
gatattgtgacatatctctgcactcatcacacaaatatcagaaatcttctataggatccacagggagggggcatttcaatatcgagacgaactaatcatc

SEQ ID NO: 1304 - RNA, 100 nt, synthetic construct
  source 1..100: mol_type = other RNA
gatattgtgacatatctctgcactcatcacacaaacactagaaatcttctataggatccacagggagggggcattctaatatccgagcgaactaatcatc

SEQ ID NO: 1305 - RNA, 100 nt, synthetic construct
  source 1..100: mol_type = other RNA
gatattgtgacatatctctgcactcatcacacaaattattaaaatcttctataggatccacagggagggggcatcttaatattgggtggaactaatcatc

SEQ ID NO: 1306 - RNA, 100 nt, synthetic construct
  source 1..100: mol_type = other RNA
gatattgtgacatatctctgcactcatcacacaaatcaacgaaatcttctataggatccacagggagggggcattttaatatccaagcgaactaatcatc

SEQ ID NO: 1307 - RNA, 100 nt, synthetic construct
  source 1..100: mol_type = other RNA
gatattgtgacatatctctgcactcatcacacaatcaccccaaatcttctataggatccacagggagggggcattttaacattagacggaactaatcatc

SEQ ID NO: 1308 - RNA, 100 nt, synthetic construct
  source 1..100: mol_type = other RNA
gatattgtgacatatctctgcactcatcacacaacctaatcaaatcttctataggatccacagggagggggcatttcaatatcgacgcgaactaatcatc

SEQ ID NO: 1309 - RNA, 100 nt, synthetic construct
  source 1..100: mol_type = other RNA
gatattgtgacatatctctgcactcatcacacaactccatcaaatcttctataggatccacagggagggggcattctaatatcgaccagaactaatcatc

SEQ ID NO: 1310 - RNA, 100 nt, synthetic construct
  source 1..100: mol_type = other RNA
gatattgtgacatatctctgcactcatcacacaacaatttcaaatcttctataggatccacagggagggggcatcttaatatcagcaagaactaatcatc

SEQ ID NO: 1311 - RNA, 100 nt, synthetic construct
  source 1..100: mol_type = other RNA
gatattgtgacatatctctgcactcatcacacaacctgcccaaatcttctataggatccacagggagggggcattttaatattccagagaactaatcatc

SEQ ID NO: 1312 - RNA, 100 nt, synthetic construct
  source 1..100: mol_type = other RNA
gatattgtgacatatctctgcactcatcacacaccgtgcgcaaatcttctataggatccacagggagggggcattttaacattacaacgaactaatcatc

SEQ ID NO: 1313 - RNA, 100 nt, synthetic construct
  source 1..100: mol_type = other RNA
gatattgtgacatatctctgcactcatcacacattatacgcaaatcttctataggatccacagggagggggcatttcaatatttacgggaactaatcatc

SEQ ID NO: 1314 - RNA, 100 nt, synthetic construct
  source 1..100: mol_type = other RNA
gatattgtgacatatctctgcactcatcacacactaaccgcaaatcttctataggatccacagggagggggcattctaatattagcacgaactaatcatc

SEQ ID NO: 1315 - RNA, 100 nt, synthetic construct
  source 1..100: mol_type = other RNA
gatattgtgacatatctctgcactcatcacacatttgtagcaaatcttctataggatccacagggagggggcatcttaatatcaaggcgaactaatcatc

SEQ ID NO: 1316 - RNA, 100 nt, synthetic construct
  source 1..100: mol_type = other RNA
gatattgtgacatatctctgcactcatcacacatgctcagcaaatcttctataggatccacagggagggggcattttaatatcagtgggaactaatcatc

SEQ ID NO: 1317 - RNA, 100 nt, synthetic construct
  source 1..100: mol_type = other RNA
gatattgtgacatatctctgcactcatcacactcctattgcaaatcttctataggatccacagggagggggcattttaacatttagtggaactaatcatc

SEQ ID NO: 1318 - RNA, 100 nt, synthetic construct
  source 1..100: mol_type = other RNA
gatattgtgacatatctctgcactcatcacactgtacctgcaaatcttctataggatccacagggagggggcatttcaatatcagcaggaactaatcatc

SEQ ID NO: 1319 - RNA, 100 nt, synthetic construct
  source 1..100: mol_type = other RNA
gatattgtgacatatctctgcactcatcacactccctctgcaaatcttctataggatccacagggagggggcattctaatattccaaagaactaatcatc

SEQ ID NO: 1320 - RNA, 100 nt, synthetic construct
  source 1..100: mol_type = other RNA
gatattgtgacatatctctgcactcatcacacttccgttgcaaatcttctataggatccacagggagggggcatcttaatatccgcaagaactaatcatc

SEQ ID NO: 1321 - RNA, 100 nt, synthetic construct
  source 1..100: mol_type = other RNA
gatattgtgacatatctctgcactcatcacaccggccttgcaaatcttctataggatccacagggagggggcattttaatatcaaggagaactaatcatc

SEQ ID NO: 1322 - RNA, 100 nt, synthetic construct
  source 1..100: mol_type = other RNA
gatattgtgacatatctctgcactcatcacaatggcaatgcaaatcttctataggatccacagggagggggcattttaacattaacaagaactaatcatc

SEQ ID NO: 1323 - RNA, 100 nt, synthetic construct
  source 1..100: mol_type = other RNA
gatattgtgacatatctctgcactcatcacaaatcaaatgcaaatcttctataggatccacagggagggggcatttcaatatttggacgaactaatcatc

SEQ ID NO: 1324 - RNA, 100 nt, synthetic construct
  source 1..100: mol_type = other RNA
gatattgtgacatatctctgcactcatcacagccataatgcaaatcttctataggatccacagggagggggcattctaatattaccgcgaactaatcatc

SEQ ID NO: 1325 - RNA, 100 nt, synthetic construct
  source 1..100: mol_type = other RNA
gatattgtgacatatctctgcactcatcacagtcaaaatgcaaatcttctataggatccacagggagggggcatcttaatatcgaggagaactaatcatc

SEQ ID NO: 1326 - RNA, 100 nt, synthetic construct
  source 1..100: mol_type = other RNA
gatattgtgacatatctctgcactcatcacaatcctcatgcaaatcttctataggatccacagggagggggcattttaatatcatgaggaactaatcatc

SEQ ID NO: 1327 - RNA, 100 nt, synthetic construct
  source 1..100: mol_type = other RNA
gatattgtgacatatctctgcactcatcactatcatgatgcaaatcttctataggatccacagggagggggcatttcaatatccgggagaactaatcatc

SEQ ID NO: 1328 - RNA, 100 nt, synthetic construct
  source 1..100: mol_type = other RNA
gatattgtgacatatctctgcactcatcactaccctgatgcaaatcttctataggatccacagggagggggcattctaatatcaccaggaactaatcatc

SEQ ID NO: 1329 - RNA, 100 nt, synthetic construct
  source 1..100: mol_type = other RNA
gatattgtgacatatctctgcactcatcacctgtctgatgcaaatcttctataggatccacagggagggggcatcttaatatcgtatagaactaatcatc

SEQ ID NO: 1330 - RNA, 100 nt, synthetic construct
  source 1..100: mol_type = other RNA
gatattgtgacatatctctgcactcatcacctggttgatgcaaatcttctataggatccacagggagggggcattttaatatcacacggaactaatcatc

SEQ ID NO: 1331 - RNA, 100 nt, synthetic construct
  source 1..100: mol_type = other RNA
gatattgtgacatatctctgcactcatcacacaaaagatgcaaatcttctcctacctccacagggagggggcatttcaatagccacgtgaactaatcatc

SEQ ID NO: 1332 - RNA, 100 nt, synthetic construct
  source 1..100: mol_type = other RNA
gatattgtgacatatctctgcactcatcacacaaaagatgcaaatcttctccccactccacagggagggggcattctaataaccacatgaactaatcatc

SEQ ID NO: 1333 - RNA, 100 nt, synthetic construct
  source 1..100: mol_type = other RNA
gatattgtgacatatctctgcactcatcacacaaaagatgcaaatcttcttccatttccacagggagggggcatcttaataaccaggtgaactaatcatc

SEQ ID NO: 1334 - RNA, 100 nt, synthetic construct
  source 1..100: mol_type = other RNA
gatattgtgacatatctctgcactcatcacacaaaagatgcaaatcttctcgcttctccacagggagggggcattttaatactggaatgaactaatcatc

SEQ ID NO: 1335 - RNA, 100 nt, synthetic construct
  source 1..100: mol_type = other RNA
gatattgtgacatatctctgcactcatcacacaaaagatgcaaatcttcgatcctatccacagggagggggcatttcaataaacaagtgaactaatcatc

SEQ ID NO: 1336 - RNA, 100 nt, synthetic construct
  source 1..100: mol_type = other RNA
gatattgtgacatatctctgcactcatcacacaaaagatgcaaatcttcgcagtcatccacagggagggggcattctaataccagcatgaactaatcatc

SEQ ID NO: 1337 - RNA, 100 nt, synthetic construct
  source 1..100: mol_type = other RNA
gatattgtgacatatctctgcactcatcacacaaaagatgcaaatcttcaacataatccacagggagggggcatcttaatagcgaagtgaactaatcatc

SEQ ID NO: 1338 - RNA, 100 nt, synthetic construct
  source 1..100: mol_type = other RNA
gatattgtgacatatctctgcactcatcacacaaaagatgcaaatcttcgtaaaaatccacagggagggggcattttaatacgggggtgaactaatcatc

SEQ ID NO: 1339 - RNA, 100 nt, synthetic construct
  source 1..100: mol_type = other RNA
gatattgtgacatatctctgcactcatcacacaaaagatgcaaatcttgataatgatccacagggagggggcatttcaatagtataatgaactaatcatc

SEQ ID NO: 1340 - RNA, 100 nt, synthetic construct
  source 1..100: mol_type = other RNA
gatattgtgacatatctctgcactcatcacacaaaagatgcaaatcttagtcttgatccacagggagggggcattctaataacgacatgaactaatcatc

SEQ ID NO: 1341 - RNA, 100 nt, synthetic construct
  source 1..100: mol_type = other RNA
gatattgtgacatatctctgcactcatcacacaaaagatgcaaatcttggcgctgatccacagggagggggcatcttaatagcaatatgaactaatcatc

SEQ ID NO: 1342 - RNA, 100 nt, synthetic construct
  source 1..100: mol_type = other RNA
gatattgtgacatatctctgcactcatcacacaaaagatgcaaatcttggcactgatccacagggagggggcattttaataggatagtgaactaatcatc

SEQ ID NO: 1343 - RNA, 100 nt, synthetic construct
  source 1..100: mol_type = other RNA
gatattgtgacatatctctgcactcatcacacaaaagatgcaaatctatactcggatccacagggagggggcatttcaataaaagtatgaactaatcatc

SEQ ID NO: 1344 - RNA, 100 nt, synthetic construct
  source 1..100: mol_type = other RNA
gatattgtgacatatctctgcactcatcacacaaaagatgcaaatctgagcgtggatccacagggagggggcattctaatagtggaatgaactaatcatc

SEQ ID NO: 1345 - RNA, 100 nt, synthetic construct
  source 1..100: mol_type = other RNA
gatattgtgacatatctctgcactcatcacacaaaagatgcaaatctgttcgcggatccacagggagggggcatcttaatacaatggtgaactaatcatc

SEQ ID NO: 1346 - RNA, 100 nt, synthetic construct
  source 1..100: mol_type = other RNA
gatattgtgacatatctctgcactcatcacacaaaagatgcaaatctaacattggatccacagggagggggcattttaatacccgagtgaactaatcatc

SEQ ID NO: 1347 - RNA, 100 nt, synthetic construct
  source 1..100: mol_type = other RNA
gatattgtgacatatctctgcactcatcacacaaaagatgcaaatcgcacaaaggatccacagggagggggcattctaatagggacatgaactaatcatc

SEQ ID NO: 1348 - RNA, 100 nt, synthetic construct
  source 1..100: mol_type = other RNA
gatattgtgacatatctctgcactcatcacacaaaagatgcaaatcaagttcaggatccacagggagggggcatcttaatagtagaatgaactaatcatc

SEQ ID NO: 1349 - RNA, 100 nt, synthetic construct
  source 1..100: mol_type = other RNA
gatattgtgacatatctctgcactcatcacacaaaagatgcaaatccgacaaaggatccacagggagggggcattttaatagggttatgaactaatcatc

SEQ ID NO: 1350 - RNA, 100 nt, synthetic construct
  source 1..100: mol_type = other RNA
gatattgtgacatatctctgcactcatcacacaaaagatgcaaatatgtattaggatccacagggagggggcatttcaatagctacatgaactaatcatc

SEQ ID NO: 1351 - RNA, 100 nt, synthetic construct
  source 1..100: mol_type = other RNA
gatattgtgacatatctctgcactcatcacacaaaagatgcaaatgaggcctaggatccacagggagggggcattctaataagctagtgaactaatcatc

SEQ ID NO: 1352 - RNA, 100 nt, synthetic construct
  source 1..100: mol_type = other RNA
gatattgtgacatatctctgcactcatcacacaaaagatgcaaataatggctaggatccacagggagggggcatcttaataccataatgaactaatcatc

SEQ ID NO: 1353 - RNA, 100 nt, synthetic construct
  source 1..100: mol_type = other RNA
gatattgtgacatatctctgcactcatcacacaaaagatgcaaatacaagttaggatccacagggagggggcattttaatacgcgagtgaactaatcatc

SEQ ID NO: 1354 - RNA, 100 nt, synthetic construct
  source 1..100: mol_type = other RNA
gatattgtgacatatctctgcactcatcacacaaaagatgcaaaaagcgaataggatccacagggagggggcatttcaatacaggtatgaactaatcatc

SEQ ID NO: 1355 - RNA, 100 nt, synthetic construct
  source 1..100: mol_type = other RNA
gatattgtgacatatctctgcactcatcacacaaaagatgcaaagtattgataggatccacagggagggggcattctaatagtgtggtgaactaatcatc

SEQ ID NO: 1356 - RNA, 100 nt, synthetic construct
  source 1..100: mol_type = other RNA
gatattgtgacatatctctgcactcatcacacaaaagatgcaaaaggtacataggatccacagggagggggcatcttaatacagagatgaactaatcatc

SEQ ID NO: 1357 - RNA, 100 nt, synthetic construct
  source 1..100: mol_type = other RNA
gatattgtgacatatctctgcactcatcacacaaaagatgcaaacgccacataggatccacagggagggggcattttaatagaatgatgaactaatcatc

SEQ ID NO: 1358 - RNA, 100 nt, synthetic construct
  source 1..100: mol_type = other RNA
gatattgtgacatatctctgcactcatcacacaaaagatgcaaccgcaatataggatccacagggagggggcatttcaataactacatgaactaatcatc

SEQ ID NO: 1359 - RNA, 100 nt, synthetic construct
  source 1..100: mol_type = other RNA
gatattgtgacatatctctgcactcatcacacaaaagatgcaacaaacgtataggatccacagggagggggcattctaatacacgcgtgaactaatcatc

SEQ ID NO: 1360 - RNA, 100 nt, synthetic construct
  source 1..100: mol_type = other RNA
gatattgtgacatatctctgcactcatcacacaaaagatgcaactgcggtataggatccacagggagggggcatcttaatacccgggtgaactaatcatc

SEQ ID NO: 1361 - RNA, 100 nt, synthetic construct
  source 1..100: mol_type = other RNA
gatattgtgacatatctctgcactcatcacacaaaagatgcaacacacatataggatccacagggagggggcattttaatagcgggatgaactaatcatc

SEQ ID NO: 1362 - RNA, 100 nt, synthetic construct
  source 1..100: mol_type = other RNA
gatattgtgacatatctctgcactcatcacacaaaagatgcattagggctataggatccacagggagggggcatttcaataatgaggtgaactaatcatc

SEQ ID NO: 1363 - RNA, 100 nt, synthetic construct
  source 1..100: mol_type = other RNA
gatattgtgacatatctctgcactcatcacacaaaagatgcatggtacctataggatccacagggagggggcattctaatagccaaatgaactaatcatc

SEQ ID NO: 1364 - RNA, 100 nt, synthetic construct
  source 1..100: mol_type = other RNA
gatattgtgacatatctctgcactcatcacacaaaagatgcatcaaaactataggatccacagggagggggcatcttaatacgaaagtgaactaatcatc

SEQ ID NO: 1365 - RNA, 100 nt, synthetic construct
  source 1..100: mol_type = other RNA
gatattgtgacatatctctgcactcatcacacaaaagatgcacgacccctataggatccacagggagggggcattttaatacgagggtgaactaatcatc

SEQ ID NO: 1366 - RNA, 100 nt, synthetic construct
  source 1..100: mol_type = other RNA
gatattgtgacatatctctgcactcatcacacaaaagatgccgcaaatctataggatccacagggagggggcatttcaatagtggcatgaactaatcatc

SEQ ID NO: 1367 - RNA, 100 nt, synthetic construct
  source 1..100: mol_type = other RNA
gatattgtgacatatctctgcactcatcacacaaaagatgcccggagtctataggatccacagggagggggcattctaatagaccaatgaactaatcatc

SEQ ID NO: 1368 - RNA, 100 nt, synthetic construct
  source 1..100: mol_type = other RNA
gatattgtgacatatctctgcactcatcacacaaaagatgctcaaaatctataggatccacagggagggggcatcttaataggggcatgaactaatcatc

SEQ ID NO: 1369 - RNA, 100 nt, synthetic construct
  source 1..100: mol_type = other RNA
gatattgtgacatatctctgcactcatcacacaaaagatgctacatatctataggatccacagggagggggcattttaatagtagcgtgaactaatcatc

SEQ ID NO: 1370 - RNA, 100 nt, synthetic construct
  source 1..100: mol_type = other RNA
gatattgtgacatatctctgcactcatcacacaaaagatggcctagttctataggatccacagggagggggcatttcaataacccaatgaactaatcatc

SEQ ID NO: 1371 - RNA, 100 nt, synthetic construct
  source 1..100: mol_type = other RNA
gatattgtgacatatctctgcactcatcacacaaaagatggtttgattctataggatccacagggagggggcattctaataaaagtatgaactaatcatc

SEQ ID NO: 1372 - RNA, 100 nt, synthetic construct
  source 1..100: mol_type = other RNA
gatattgtgacatatctctgcactcatcacacaaaagatggttacattctataggatccacagggagggggcatcttaataacagcatgaactaatcatc

SEQ ID NO: 1373 - RNA, 100 nt, synthetic construct
  source 1..100: mol_type = other RNA
gatattgtgacatatctctgcactcatcacacaaaagatgaatcaattctataggatccacagggagggggcattttaataaccacgtgaactaatcatc

SEQ ID NO: 1374 - RNA, 100 nt, synthetic construct
  source 1..100: mol_type = other RNA
gatattgtgacatatctctgcactcatcacacaaaagattccgtccttctataggatccacagggagggggcatttcaataatgacatgaactaatcatc

SEQ ID NO: 1375 - RNA, 100 nt, synthetic construct
  source 1..100: mol_type = other RNA
gatattgtgacatatctctgcactcatcacacaaaagataagtggcttctataggatccacagggagggggcattctaatagcaaaatgaactaatcatc

SEQ ID NO: 1376 - RNA, 100 nt, synthetic construct
  source 1..100: mol_type = other RNA
gatattgtgacatatctctgcactcatcacacaaaagataacgtccttctataggatccacagggagggggcatcttaataactgagtgaactaatcatc

SEQ ID NO: 1377 - RNA, 100 nt, synthetic construct
  source 1..100: mol_type = other RNA
gatattgtgacatatctctgcactcatcacacaaaagatcttcaccttctataggatccacagggagggggcattttaatacggtggtgaactaatcatc

SEQ ID NO: 1378 - RNA, 100 nt, synthetic construct
  source 1..100: mol_type = other RNA
gatattgtgacatatctctgcactcatcacacaaaagaccgttttcttctataggatccacagggagggggcatttcaatacggagatgaactaatcatc

SEQ ID NO: 1379 - RNA, 100 nt, synthetic construct
  source 1..100: mol_type = other RNA
gatattgtgacatatctctgcactcatcacacaaaagactagtctcttctataggatccacagggagggggcattctaatagctgggtgaactaatcatc

SEQ ID NO: 1380 - RNA, 100 nt, synthetic construct
  source 1..100: mol_type = other RNA
gatattgtgacatatctctgcactcatcacacaaaagaacactttcttctataggatccacagggagggggcatcttaatagtgggatgaactaatcatc

SEQ ID NO: 1381 - RNA, 100 nt, synthetic construct
  source 1..100: mol_type = other RNA
gatattgtgacatatctctgcactcatcacacaaaagagacctttcttctataggatccacagggagggggcattttaatagaataatgaactaatcatc

SEQ ID NO: 1382 - RNA, 100 nt, synthetic construct
  source 1..100: mol_type = other RNA
gatattgtgacatatctctgcactcatcacacaaaagcaccctatcttctataggatccacagggagggggcatttcaatagcggagtgaactaatcatc

SEQ ID NO: 1383 - RNA, 100 nt, synthetic construct
  source 1..100: mol_type = other RNA
gatattgtgacatatctctgcactcatcacacaaaagtcatttatcttctataggatccacagggagggggcattctaataccctagtgaactaatcatc

SEQ ID NO: 1384 - RNA, 100 nt, synthetic construct
  source 1..100: mol_type = other RNA
gatattgtgacatatctctgcactcatcacacaaaagttacccatcttctataggatccacagggagggggcattttaataggcagatgaactaatcatc

SEQ ID NO: 1385 - RNA, 100 nt, synthetic construct
  source 1..100: mol_type = other RNA
gatattgtgacatatctctgcactcatcacacaaaatttttcaatcttctataggatccacagggagggggcatttcaataacgaaatgaactaatcatc

SEQ ID NO: 1386 - RNA, 100 nt, synthetic construct
  source 1..100: mol_type = other RNA
gatattgtgacatatctctgcactcatcacacaaaatcatataatcttctataggatccacagggagggggcattctaataaagtggtgaactaatcatc

SEQ ID NO: 1387 - RNA, 100 nt, synthetic construct
  source 1..100: mol_type = other RNA
gatattgtgacatatctctgcactcatcacacaaaaattaacaatcttctataggatccacagggagggggcatcttaatacaatagtgaactaatcatc

SEQ ID NO: 1388 - RNA, 100 nt, synthetic construct
  source 1..100: mol_type = other RNA
gatattgtgacatatctctgcactcatcacacaaaaaacaataatcttctataggatccacagggagggggcattttaatactgaggtgaactaatcatc

SEQ ID NO: 1389 - RNA, 100 nt, synthetic construct
  source 1..100: mol_type = other RNA
gatattgtgacatatctctgcactcatcacacaaatacacaaaatcttctataggatccacagggagggggcatttcaatagccgcatgaactaatcatc

SEQ ID NO: 1390 - RNA, 100 nt, synthetic construct
  source 1..100: mol_type = other RNA
gatattgtgacatatctctgcactcatcacacaaattcccgaaatcttctataggatccacagggagggggcattctaatagaagaatgaactaatcatc

SEQ ID NO: 1391 - RNA, 100 nt, synthetic construct
  source 1..100: mol_type = other RNA
gatattgtgacatatctctgcactcatcacacaaacgcacgaaatcttctataggatccacagggagggggcatcttaataacagcgtgaactaatcatc

SEQ ID NO: 1392 - RNA, 100 nt, synthetic construct
  source 1..100: mol_type = other RNA
gatattgtgacatatctctgcactcatcacacaatgaattcaaatcttctataggatccacagggagggggcatttcaataaaaaggtgaactaatcatc

SEQ ID NO: 1393 - RNA, 100 nt, synthetic construct
  source 1..100: mol_type = other RNA
gatattgtgacatatctctgcactcatcacacaacgctttcaaatcttctataggatccacagggagggggcattctaatactagcatgaactaatcatc

SEQ ID NO: 1394 - RNA, 100 nt, synthetic construct
  source 1..100: mol_type = other RNA
gatattgtgacatatctctgcactcatcacacaatgaatacaaatcttctataggatccacagggagggggcatcttaatagactgatgaactaatcatc

SEQ ID NO: 1395 - RNA, 100 nt, synthetic construct
  source 1..100: mol_type = other RNA
gatattgtgacatatctctgcactcatcacacaattatttcaaatcttctataggatccacagggagggggcattttaatagtgaaatgaactaatcatc

SEQ ID NO: 1396 - RNA, 100 nt, synthetic construct
  source 1..100: mol_type = other RNA
gatattgtgacatatctctgcactcatcacacacctagcgcaaatcttctataggatccacagggagggggcatttcaatagtgtggtgaactaatcatc

SEQ ID NO: 1397 - RNA, 100 nt, synthetic construct
  source 1..100: mol_type = other RNA
gatattgtgacatatctctgcactcatcacacatttctagcaaatcttctataggatccacagggagggggcattctaatacgaggatgaactaatcatc

SEQ ID NO: 1398 - RNA, 100 nt, synthetic construct
  source 1..100: mol_type = other RNA
gatattgtgacatatctctgcactcatcacacacgcaacgcaaatcttctataggatccacagggagggggcatcttaataccgacatgaactaatcatc

SEQ ID NO: 1399 - RNA, 100 nt, synthetic construct
  source 1..100: mol_type = other RNA
gatattgtgacatatctctgcactcatcacacacttcgggcaaatcttctataggatccacagggagggggcattttaatactagagtgaactaatcatc

SEQ ID NO: 1400 - RNA, 100 nt, synthetic construct
  source 1..100: mol_type = other RNA
gatattgtgacatatctctgcactcatcacaccgcacttgcaaatcttctataggatccacagggagggggcatttcaatactggggtgaactaatcatc

SEQ ID NO: 1401 - RNA, 100 nt, synthetic construct
  source 1..100: mol_type = other RNA
gatattgtgacatatctctgcactcatcacacccctactgcaaatcttctataggatccacagggagggggcattctaataggaggatgaactaatcatc

SEQ ID NO: 1402 - RNA, 100 nt, synthetic construct
  source 1..100: mol_type = other RNA
gatattgtgacatatctctgcactcatcacaccctccctgcaaatcttctataggatccacagggagggggcatcttaataagcgggtgaactaatcatc

SEQ ID NO: 1403 - RNA, 100 nt, synthetic construct
  source 1..100: mol_type = other RNA
gatattgtgacatatctctgcactcatcacaccttccctgcaaatcttctataggatccacagggagggggcattttaatagaatggtgaactaatcatc

SEQ ID NO: 1404 - RNA, 100 nt, synthetic construct
  source 1..100: mol_type = other RNA
gatattgtgacatatctctgcactcatcacaacttccatgcaaatcttctataggatccacagggagggggcatttcaataaggagatgaactaatcatc

SEQ ID NO: 1405 - RNA, 100 nt, synthetic construct
  source 1..100: mol_type = other RNA
gatattgtgacatatctctgcactcatcacagcaccaatgcaaatcttctataggatccacagggagggggcattctaatacgggtatgaactaatcatc

SEQ ID NO: 1406 - RNA, 100 nt, synthetic construct
  source 1..100: mol_type = other RNA
gatattgtgacatatctctgcactcatcacaacccatatgcaaatcttctataggatccacagggagggggcatcttaatacaagagtgaactaatcatc

SEQ ID NO: 1407 - RNA, 100 nt, synthetic construct
  source 1..100: mol_type = other RNA
gatattgtgacatatctctgcactcatcacagctctcatgcaaatcttctataggatccacagggagggggcattttaatacaggcatgaactaatcatc

SEQ ID NO: 1408 - RNA, 100 nt, synthetic construct
  source 1..100: mol_type = other RNA
gatattgtgacatatctctgcactcatcacttctttgatgcaaatcttctataggatccacagggagggggcatttcaataaggggatgaactaatcatc

SEQ ID NO: 1409 - RNA, 100 nt, synthetic construct
  source 1..100: mol_type = other RNA
gatattgtgacatatctctgcactcatcactccactgatgcaaatcttctataggatccacagggagggggcattctaataacaacgtgaactaatcatc

SEQ ID NO: 1410 - RNA, 100 nt, synthetic construct
  source 1..100: mol_type = other RNA
gatattgtgacatatctctgcactcatcacctttacgatgcaaatcttctataggatccacagggagggggcatcttaatacacccatgaactaatcatc

SEQ ID NO: 1411 - RNA, 100 nt, synthetic construct
  source 1..100: mol_type = other RNA
gatattgtgacatatctctgcactcatcactatatcgatgcaaatcttctataggatccacagggagggggcattttaatacactgatgaactaatcatc

SEQ ID NO: 1412 - RNA, 100 nt, synthetic construct
  source 1..100: mol_type = other RNA
gatattgtgacatatctctgcactcatcacacaaaagatgcaaatcttcctccctatccacagggagggggcatttcaatcggacgctgaactaatcatc

SEQ ID NO: 1413 - RNA, 100 nt, synthetic construct
  source 1..100: mol_type = other RNA
gatattgtgacatatctctgcactcatcacacaaaagatgcaaatcttcacatatatccacagggagggggcattctaattctgacctgaactaatcatc

SEQ ID NO: 1414 - RNA, 100 nt, synthetic construct
  source 1..100: mol_type = other RNA
gatattgtgacatatctctgcactcatcacacaaaagatgcaaatcttccaatctatccacagggagggggcatcttaattaacacctgaactaatcatc

SEQ ID NO: 1415 - RNA, 100 nt, synthetic construct
  source 1..100: mol_type = other RNA
gatattgtgacatatctctgcactcatcacacaaaagatgcaaatcttcggcgccatccacagggagggggcattttaatcgccgactgaactaatcatc

SEQ ID NO: 1416 - RNA, 100 nt, synthetic construct
  source 1..100: mol_type = other RNA
gatattgtgacatatctctgcactcatcacacaaaagatgcaaatcttggtcatgatccacagggagggggcatttcaatctgacactgaactaatcatc

SEQ ID NO: 1417 - RNA, 100 nt, synthetic construct
  source 1..100: mol_type = other RNA
gatattgtgacatatctctgcactcatcacacaaaagatgcaaatcttagctccgatccacagggagggggcattctaattacggactgaactaatcatc

SEQ ID NO: 1418 - RNA, 100 nt, synthetic construct
  source 1..100: mol_type = other RNA
gatattgtgacatatctctgcactcatcacacaaaagatgcaaatcttacgattgatccacagggagggggcatcttaatccggacctgaactaatcatc

SEQ ID NO: 1419 - RNA, 100 nt, synthetic construct
  source 1..100: mol_type = other RNA
gatattgtgacatatctctgcactcatcacacaaaagatgcaaatcttgacgccgatccacagggagggggcattttaatcggcagctgaactaatcatc

SEQ ID NO: 1420 - RNA, 100 nt, synthetic construct
  source 1..100: mol_type = other RNA
gatattgtgacatatctctgcactcatcacacaaaagatgcaaatctgattgcggatccacagggagggggcatttcaattttaggctgaactaatcatc

SEQ ID NO: 1421 - RNA, 100 nt, synthetic construct
  source 1..100: mol_type = other RNA
gatattgtgacatatctctgcactcatcacacaaaagatgcaaatctggacctggatccacagggagggggcattctaatcgctagctgaactaatcatc

SEQ ID NO: 1422 - RNA, 100 nt, synthetic construct
  source 1..100: mol_type = other RNA
gatattgtgacatatctctgcactcatcacacaaaagatgcaaatctggttacggatccacagggagggggcatcttaattccggactgaactaatcatc

SEQ ID NO: 1423 - RNA, 100 nt, synthetic construct
  source 1..100: mol_type = other RNA
gatattgtgacatatctctgcactcatcacacaaaagatgcaaatctcagtctggatccacagggagggggcattttaatcaaacactgaactaatcatc

SEQ ID NO: 1424 - RNA, 100 nt, synthetic construct
  source 1..100: mol_type = other RNA
gatattgtgacatatctctgcactcatcacacaaaagatgcaaatcgccatgaggatccacagggagggggcatttcaattactggctgaactaatcatc

SEQ ID NO: 1425 - RNA, 100 nt, synthetic construct
  source 1..100: mol_type = other RNA
gatattgtgacatatctctgcactcatcacacaaaagatgcaaatcgtaggaaggatccacagggagggggcattctaatcttgacctgaactaatcatc

SEQ ID NO: 1426 - RNA, 100 nt, synthetic construct
  source 1..100: mol_type = other RNA
gatattgtgacatatctctgcactcatcacacaaaagatgcaaatcaagaacaggatccacagggagggggcatcttaattttgagctgaactaatcatc

SEQ ID NO: 1427 - RNA, 100 nt, synthetic construct
  source 1..100: mol_type = other RNA
gatattgtgacatatctctgcactcatcacacaaaagatgcaaatcccgggaaggatccacagggagggggcattttaatcggcgactgaactaatcatc

SEQ ID NO: 1428 - RNA, 100 nt, synthetic construct
  source 1..100: mol_type = other RNA
gatattgtgacatatctctgcactcatcacacaaaagatgcaaatgcagtctaggatccacagggagggggcatttcaattggcagctgaactaatcatc

SEQ ID NO: 1429 - RNA, 100 nt, synthetic construct
  source 1..100: mol_type = other RNA
gatattgtgacatatctctgcactcatcacacaaaagatgcaaatacaacctaggatccacagggagggggcattctaattaaagactgaactaatcatc

SEQ ID NO: 1430 - RNA, 100 nt, synthetic construct
  source 1..100: mol_type = other RNA
gatattgtgacatatctctgcactcatcacacaaaagatgcaaatacagattaggatccacagggagggggcatcttaattcaaacctgaactaatcatc

SEQ ID NO: 1431 - RNA, 100 nt, synthetic construct
  source 1..100: mol_type = other RNA
gatattgtgacatatctctgcactcatcacacaaaagatgcaaatataggttaggatccacagggagggggcattttaattcgaggctgaactaatcatc

SEQ ID NO: 1432 - RNA, 100 nt, synthetic construct
  source 1..100: mol_type = other RNA
gatattgtgacatatctctgcactcatcacacaaaagatgcaaagtcaaaataggatccacagggagggggcatttcaatccagacctgaactaatcatc

SEQ ID NO: 1433 - RNA, 100 nt, synthetic construct
  source 1..100: mol_type = other RNA
gatattgtgacatatctctgcactcatcacacaaaagatgcaaaattaaaataggatccacagggagggggcattctaatcaacggctgaactaatcatc

SEQ ID NO: 1434 - RNA, 100 nt, synthetic construct
  source 1..100: mol_type = other RNA
gatattgtgacatatctctgcactcatcacacaaaagatgcaaacccgtaataggatccacagggagggggcatcttaatcacgacctgaactaatcatc

SEQ ID NO: 1435 - RNA, 100 nt, synthetic construct
  source 1..100: mol_type = other RNA
gatattgtgacatatctctgcactcatcacacaaaagatgcaaaagataaataggatccacagggagggggcattttaattcagacctgaactaatcatc

SEQ ID NO: 1436 - RNA, 100 nt, synthetic construct
  source 1..100: mol_type = other RNA
gatattgtgacatatctctgcactcatcacacaaaagatgcaacgttaatataggatccacagggagggggcatttcaatccaaacctgaactaatcatc

SEQ ID NO: 1437 - RNA, 100 nt, synthetic construct
  source 1..100: mol_type = other RNA
gatattgtgacatatctctgcactcatcacacaaaagatgcaacagtggtataggatccacagggagggggcattctaattgcgacctgaactaatcatc

SEQ ID NO: 1438 - RNA, 100 nt, synthetic construct
  source 1..100: mol_type = other RNA
gatattgtgacatatctctgcactcatcacacaaaagatgcaatagggatataggatccacagggagggggcatcttaatcattaactgaactaatcatc

SEQ ID NO: 1439 - RNA, 100 nt, synthetic construct
  source 1..100: mol_type = other RNA
gatattgtgacatatctctgcactcatcacacaaaagatgcaacaggagtataggatccacagggagggggcattttaattgccaactgaactaatcatc

SEQ ID NO: 1440 - RNA, 100 nt, synthetic construct
  source 1..100: mol_type = other RNA
gatattgtgacatatctctgcactcatcacacaaaagatgcatacgggctataggatccacagggagggggcatttcaattgtgggctgaactaatcatc

SEQ ID NO: 1441 - RNA, 100 nt, synthetic construct
  source 1..100: mol_type = other RNA
gatattgtgacatatctctgcactcatcacacaaaagatgcacaggggctataggatccacagggagggggcattctaattccctgctgaactaatcatc

SEQ ID NO: 1442 - RNA, 100 nt, synthetic construct
  source 1..100: mol_type = other RNA
gatattgtgacatatctctgcactcatcacacaaaagatgcattgagactataggatccacagggagggggcatcttaattgggagctgaactaatcatc

SEQ ID NO: 1443 - RNA, 100 nt, synthetic construct
  source 1..100: mol_type = other RNA
gatattgtgacatatctctgcactcatcacacaaaagatgcatcggccctataggatccacagggagggggcattttaatcattacctgaactaatcatc

SEQ ID NO: 1444 - RNA, 100 nt, synthetic construct
  source 1..100: mol_type = other RNA
gatattgtgacatatctctgcactcatcacacaaaagatgctttcactctataggatccacagggagggggcatttcaattttggactgaactaatcatc

SEQ ID NO: 1445 - RNA, 100 nt, synthetic construct
  source 1..100: mol_type = other RNA
gatattgtgacatatctctgcactcatcacacaaaagatgctttggctctataggatccacagggagggggcattctaatcttggactgaactaatcatc

SEQ ID NO: 1446 - RNA, 100 nt, synthetic construct
  source 1..100: mol_type = other RNA
gatattgtgacatatctctgcactcatcacacaaaagatgcctcagatctataggatccacagggagggggcatcttaatccagggctgaactaatcatc

SEQ ID NO: 1447 - RNA, 100 nt, synthetic construct
  source 1..100: mol_type = other RNA
gatattgtgacatatctctgcactcatcacacaaaagatgccataaatctataggatccacagggagggggcattttaatcactagctgaactaatcatc

SEQ ID NO: 1448 - RNA, 100 nt, synthetic construct
  source 1..100: mol_type = other RNA
gatattgtgacatatctctgcactcatcacacaaaagatgaaactattctataggatccacagggagggggcatttcaatcaggtgctgaactaatcatc

SEQ ID NO: 1449 - RNA, 100 nt, synthetic construct
  source 1..100: mol_type = other RNA
gatattgtgacatatctctgcactcatcacacaaaagatggctcaattctataggatccacagggagggggcattctaatcactgactgaactaatcatc

SEQ ID NO: 1450 - RNA, 100 nt, synthetic construct
  source 1..100: mol_type = other RNA
gatattgtgacatatctctgcactcatcacacaaaagatggcgccattctataggatccacagggagggggcatcttaatcacaaactgaactaatcatc

SEQ ID NO: 1451 - RNA, 100 nt, synthetic construct
  source 1..100: mol_type = other RNA
gatattgtgacatatctctgcactcatcacacaaaagatgattcggttctataggatccacagggagggggcattttaattctgggctgaactaatcatc

SEQ ID NO: 1452 - RNA, 100 nt, synthetic construct
  source 1..100: mol_type = other RNA
gatattgtgacatatctctgcactcatcacacaaaagattaataacttctataggatccacagggagggggcatttcaattaccaactgaactaatcatc

SEQ ID NO: 1453 - RNA, 100 nt, synthetic construct
  source 1..100: mol_type = other RNA
gatattgtgacatatctctgcactcatcacacaaaagatcttcaccttctataggatccacagggagggggcattctaattgcccactgaactaatcatc

SEQ ID NO: 1454 - RNA, 100 nt, synthetic construct
  source 1..100: mol_type = other RNA
gatattgtgacatatctctgcactcatcacacaaaagatcttgcccttctataggatccacagggagggggcatcttaattaccggctgaactaatcatc

SEQ ID NO: 1455 - RNA, 100 nt, synthetic construct
  source 1..100: mol_type = other RNA
gatattgtgacatatctctgcactcatcacacaaaagatctttaccttctataggatccacagggagggggcattttaatcgaaaactgaactaatcatc

SEQ ID NO: 1456 - RNA, 100 nt, synthetic construct
  source 1..100: mol_type = other RNA
gatattgtgacatatctctgcactcatcacacaaaagacaatcttcttctataggatccacagggagggggcatttcaattggcgactgaactaatcatc

SEQ ID NO: 1457 - RNA, 100 nt, synthetic construct
  source 1..100: mol_type = other RNA
gatattgtgacatatctctgcactcatcacacaaaagacccccttcttctataggatccacagggagggggcattctaatcgttaactgaactaatcatc

SEQ ID NO: 1458 - RNA, 100 nt, synthetic construct
  source 1..100: mol_type = other RNA
gatattgtgacatatctctgcactcatcacacaaaagaaaggtttcttctataggatccacagggagggggcatcttaattgtgggctgaactaatcatc

SEQ ID NO: 1459 - RNA, 100 nt, synthetic construct
  source 1..100: mol_type = other RNA
gatattgtgacatatctctgcactcatcacacaaaagagaccactcttctataggatccacagggagggggcattttaattttaagctgaactaatcatc

SEQ ID NO: 1460 - RNA, 100 nt, synthetic construct
  source 1..100: mol_type = other RNA
gatattgtgacatatctctgcactcatcacacaaaagtcttttatcttctataggatccacagggagggggcatttcaattgcagactgaactaatcatc

SEQ ID NO: 1461 - RNA, 100 nt, synthetic construct
  source 1..100: mol_type = other RNA
gatattgtgacatatctctgcactcatcacacaaaagctttctatcttctataggatccacagggagggggcattctaatcgacggctgaactaatcatc

SEQ ID NO: 1462 - RNA, 100 nt, synthetic construct
  source 1..100: mol_type = other RNA
gatattgtgacatatctctgcactcatcacacaaaagtcatctatcttctataggatccacagggagggggcatcttaattataggctgaactaatcatc

SEQ ID NO: 1463 - RNA, 100 nt, synthetic construct
  source 1..100: mol_type = other RNA
gatattgtgacatatctctgcactcatcacacaaaagcatagtatcttctataggatccacagggagggggcattttaatcacctgctgaactaatcatc

SEQ ID NO: 1464 - RNA, 100 nt, synthetic construct
  source 1..100: mol_type = other RNA
gatattgtgacatatctctgcactcatcacacaaaaatttacaatcttctataggatccacagggagggggcatttcaattcgagactgaactaatcatc

SEQ ID NO: 1465 - RNA, 100 nt, synthetic construct
  source 1..100: mol_type = other RNA
gatattgtgacatatctctgcactcatcacacaaaacctatcaatcttctataggatccacagggagggggcattctaatctccggctgaactaatcatc

SEQ ID NO: 1466 - RNA, 100 nt, synthetic construct
  source 1..100: mol_type = other RNA
gatattgtgacatatctctgcactcatcacacaaaatctcccaatcttctataggatccacagggagggggcattttaattggacgctgaactaatcatc

SEQ ID NO: 1467 - RNA, 100 nt, synthetic construct
  source 1..100: mol_type = other RNA
gatattgtgacatatctctgcactcatcacacaaactctaaaaatcttctataggatccacagggagggggcatttcaatcattggctgaactaatcatc

SEQ ID NO: 1468 - RNA, 100 nt, synthetic construct
  source 1..100: mol_type = other RNA
gatattgtgacatatctctgcactcatcacacaaatacgagaaatcttctataggatccacagggagggggcattctaattgaccactgaactaatcatc

SEQ ID NO: 1469 - RNA, 100 nt, synthetic construct
  source 1..100: mol_type = other RNA
gatattgtgacatatctctgcactcatcacacaaatccggaaaatcttctataggatccacagggagggggcatcttaattcggggctgaactaatcatc

SEQ ID NO: 1470 - RNA, 100 nt, synthetic construct
  source 1..100: mol_type = other RNA
gatattgtgacatatctctgcactcatcacacaaattaacaaaatcttctataggatccacagggagggggcattttaattcctggctgaactaatcatc

SEQ ID NO: 1471 - RNA, 100 nt, synthetic construct
  source 1..100: mol_type = other RNA
gatattgtgacatatctctgcactcatcacacaatgcagccaaatcttctataggatccacagggagggggcatttcaatcaggtactgaactaatcatc

SEQ ID NO: 1472 - RNA, 100 nt, synthetic construct
  source 1..100: mol_type = other RNA
gatattgtgacatatctctgcactcatcacacaaccacaacaaatcttctataggatccacagggagggggcattctaattagggactgaactaatcatc

SEQ ID NO: 1473 - RNA, 100 nt, synthetic construct
  source 1..100: mol_type = other RNA
gatattgtgacatatctctgcactcatcacacaatttactcaaatcttctataggatccacagggagggggcatcttaatctccgactgaactaatcatc

SEQ ID NO: 1474 - RNA, 100 nt, synthetic construct
  source 1..100: mol_type = other RNA
gatattgtgacatatctctgcactcatcacacaacacttacaaatcttctataggatccacagggagggggcattttaattccatgctgaactaatcatc

SEQ ID NO: 1475 - RNA, 100 nt, synthetic construct
  source 1..100: mol_type = other RNA
gatattgtgacatatctctgcactcatcacacatacaaagcaaatcttctataggatccacagggagggggcatttcaatccctgactgaactaatcatc

SEQ ID NO: 1476 - RNA, 100 nt, synthetic construct
  source 1..100: mol_type = other RNA
gatattgtgacatatctctgcactcatcacacacttaacgcaaatcttctataggatccacagggagggggcattctaatccagggctgaactaatcatc

SEQ ID NO: 1477 - RNA, 100 nt, synthetic construct
  source 1..100: mol_type = other RNA
gatattgtgacatatctctgcactcatcacacacgcccggcaaatcttctataggatccacagggagggggcatcttaatcaccagctgaactaatcatc

SEQ ID NO: 1478 - RNA, 100 nt, synthetic construct
  source 1..100: mol_type = other RNA
gatattgtgacatatctctgcactcatcacacattttccgcaaatcttctataggatccacagggagggggcattttaatcgagtactgaactaatcatc

SEQ ID NO: 1479 - RNA, 100 nt, synthetic construct
  source 1..100: mol_type = other RNA
gatattgtgacatatctctgcactcatcacacttcgcttgcaaatcttctataggatccacagggagggggcatttcaatcgttacctgaactaatcatc

SEQ ID NO: 1480 - RNA, 100 nt, synthetic construct
  source 1..100: mol_type = other RNA
gatattgtgacatatctctgcactcatcacactataactgcaaatcttctataggatccacagggagggggcattctaattctggactgaactaatcatc

SEQ ID NO: 1481 - RNA, 100 nt, synthetic construct
  source 1..100: mol_type = other RNA
gatattgtgacatatctctgcactcatcacaccttgtctgcaaatcttctataggatccacagggagggggcatcttaattagggactgaactaatcatc

SEQ ID NO: 1482 - RNA, 100 nt, synthetic construct
  source 1..100: mol_type = other RNA
gatattgtgacatatctctgcactcatcacactctcgttgcaaatcttctataggatccacagggagggggcattttaattaagtgctgaactaatcatc

SEQ ID NO: 1483 - RNA, 100 nt, synthetic construct
  source 1..100: mol_type = other RNA
gatattgtgacatatctctgcactcatcacaagctatatgcaaatcttctataggatccacagggagggggcatttcaatccaaacctgaactaatcatc

SEQ ID NO: 1484 - RNA, 100 nt, synthetic construct
  source 1..100: mol_type = other RNA
gatattgtgacatatctctgcactcatcacagcccccatgcaaatcttctataggatccacagggagggggcattctaatccgacgctgaactaatcatc

SEQ ID NO: 1485 - RNA, 100 nt, synthetic construct
  source 1..100: mol_type = other RNA
gatattgtgacatatctctgcactcatcacagtgctcatgcaaatcttctataggatccacagggagggggcatcttaattgaaacctgaactaatcatc

SEQ ID NO: 1486 - RNA, 100 nt, synthetic construct
  source 1..100: mol_type = other RNA
gatattgtgacatatctctgcactcatcacaatttgtatgcaaatcttctataggatccacagggagggggcattttaatcctagactgaactaatcatc

SEQ ID NO: 1487 - RNA, 100 nt, synthetic construct
  source 1..100: mol_type = other RNA
gatattgtgacatatctctgcactcatcactttagtgatgcaaatcttctataggatccacagggagggggcatttcaattgcgtactgaactaatcatc

SEQ ID NO: 1488 - RNA, 100 nt, synthetic construct
  source 1..100: mol_type = other RNA
gatattgtgacatatctctgcactcatcactagctcgatgcaaatcttctataggatccacagggagggggcattctaatctttacctgaactaatcatc

SEQ ID NO: 1489 - RNA, 100 nt, synthetic construct
  source 1..100: mol_type = other RNA
gatattgtgacatatctctgcactcatcacctttccgatgcaaatcttctataggatccacagggagggggcattttaattttagactgaactaatcatc

SEQ ID NO: 1490 - RNA, 100 nt, synthetic construct
  source 1..100: mol_type = other RNA
gacctggggacatatcgagagtctcatcacctctatgatgcaaaacacggataggatcatctcagagggggctttaacatatatctataatgtaatcatc

SEQ ID NO: 1491 - RNA, 100 nt, synthetic construct
  source 1..100: mol_type = other RNA
gatactttatcatatctctggttggctcacacaaaatacagtaatcttctatcctacgcacagggaggcctacctttaatatataagcacactaatcatc

SEQ ID NO: 1492 - RNA, 100 nt, synthetic construct
  source 1..100: mol_type = other RNA
gatattgtgagttccgtctgcactcatctgaaataagatgcaaatcgcagagaggatccacaggcccacagcattttaatatcagcccgaactaatcatc

SEQ ID NO: 1493 - RNA, 100 nt, synthetic construct
  source 1..100: mol_type = other RNA
gatattgtgacatatctctgatgtgttcacacaaaagatgaactcgttctataggatccaattactgggggcattttaattaagacctgaactaatcatc

SEQ ID NO: 1494 - RNA, 100 nt, synthetic construct
  source 1..100: mol_type = other RNA
gatattgtgacagtgaagtgcactcatcacacaattaaatcaaatcttctataggaaagaatgggagggggcattttataagacctctgaactaatcatc

SEQ ID NO: 1495 - RNA, 100 nt, synthetic construct
  source 1..100: mol_type = other RNA
gccattgtgtgatatctgagcactccgcacacaccagatgcctgacctctataggatccacagggagggggcatttcaatatatcggaactctaatcatc

SEQ ID NO: 1496 - RNA, 100 nt, synthetic construct
  source 1..100: mol_type = other RNA
gatatgcagacatagacctgcacctttcacactatagatgcctgacctctataggatccacagggagggggcatttcaatatatcggaactctaatcatc

SEQ ID NO: 1497 - RNA, 100 nt, synthetic construct
  source 1..100: mol_type = other RNA
gttcgtgtgaccaaactctgccaagatcacagtatagatgcctgacctctataggatccacagggagggggcatttcaatatatcggaactctaatcatc

SEQ ID NO: 1498 - RNA, 100 nt, synthetic construct
  source 1..100: mol_type = other RNA
gatattgtccaaaatctctctttccatcactgttcagatgcctgacctctataggatccacagggagggggcatttcaatatatcggaactctaatcatc

SEQ ID NO: 1499 - RNA, 100 nt, synthetic construct
  source 1..100: mol_type = other RNA
gtgattgtgactaatctctgccgtcatcacaataaagatgcctgacctctataggatccacagggagggggcatttcaatatatcggaactctaatcatc

SEQ ID NO: 1500 - RNA, 100 nt, synthetic construct
  source 1..100: mol_type = other RNA
gatattgtccaatatctctaatctcatcactgtaaagatgcctgacctctataggatccacagggagggggcatttcaatatatcggaactctaatcatc

SEQ ID NO: 1501 - RNA, 100 nt, synthetic construct
  source 1..100: mol_type = other RNA
gatatctttacatatctggtgactcatcaacctaaagatgcctgacctctataggatccacagggagggggcatttcaatatatcggaactctaatcatc

SEQ ID NO: 1502 - RNA, 100 nt, synthetic construct
  source 1..100: mol_type = other RNA
gaaagtctgacatatgcacccactcatctgaataaagatgcctgacctctataggatccacagggagggggcatttcaatatatcggaactctaatcatc

SEQ ID NO: 1503 - RNA, 100 nt, synthetic construct
  source 1..100: mol_type = other RNA
gatatactgacatatctaagcactcatcagccaaaagatgcctgacctctataggatccacagggagggggcatttcaatatatcggaactctaatcatc

SEQ ID NO: 1504 - RNA, 100 nt, synthetic construct
  source 1..100: mol_type = other RNA
gagtgtgtgacatatgagtgcactcatccttcaaaagatgcctgacctctataggatccacagggagggggcatttcaatatatcggaactctaatcatc

SEQ ID NO: 1505 - RNA, 100 nt, synthetic construct
  source 1..100: mol_type = other RNA
gatattgtgacattggcctgcactcatgtatcaaaagatgcctgacctctataggatccacagggagggggcatttcaatatatcggaactctaatcatc

SEQ ID NO: 1506 - RNA, 100 nt, synthetic construct
  source 1..100: mol_type = other RNA
gatattgtgaccttaatctgcactcagccttcaaaagatgcctgacctctataggatccacagggagggggcatttcaatatatcggaactctaatcatc

SEQ ID NO: 1507 - RNA, 100 nt, synthetic construct
  source 1..100: mol_type = other RNA
gatattgtgacattgctctgcactcatgccacaaaagatgcctgacctctataggatccacagggagggggcatttcaatatatcggaactctaatcatc

SEQ ID NO: 1508 - RNA, 100 nt, synthetic construct
  source 1..100: mol_type = other RNA
gatattgtgactactctctgcactcaagccacaaaagatgcctgacctctataggatccacagggagggggcatttcaatatatcggaactctaatcatc

SEQ ID NO: 1509 - RNA, 100 nt, synthetic construct
  source 1..100: mol_type = other RNA
gatattgtgtgtcatctctgcactcctaccacaaaagatgcctgacctctataggatccacagggagggggcatttcaatatatcggaactctaatcatc

SEQ ID NO: 1510 - RNA, 100 nt, synthetic construct
  source 1..100: mol_type = other RNA
gatattggcagttatctctgcactgtagtcacaaaagatgcctgacctctataggatccacagggagggggcatttcaatatatcggaactctaatcatc

SEQ ID NO: 1511 - RNA, 100 nt, synthetic construct
  source 1..100: mol_type = other RNA
gatattgtgtaatatctctgcactctacacacaaaagatgcctgacctctataggatccacagggagggggcatttcaatatatcggaactctaatcatc

SEQ ID NO: 1512 - RNA, 100 nt, synthetic construct
  source 1..100: mol_type = other RNA
gatattgattcatatctctgcactgcgcacacaaaagatgcctgacctctataggatccacagggagggggcatttcaatatatcggaactctaatcatc

SEQ ID NO: 1513 - RNA, 100 nt, synthetic construct
  source 1..100: mol_type = other RNA
gatatataaacatatctctgcacagcccacacaaaagatgcctgacctctataggatccacagggagggggcatttcaatatatcggaactctaatcatc

SEQ ID NO: 1514 - RNA, 100 nt, synthetic construct
  source 1..100: mol_type = other RNA
gattcaaggacatatctctgcagaaaacacacaaaagatgcctgacctctataggatccacagggagggggcatttcaatatatcggaactctaatcatc

SEQ ID NO: 1515 - RNA, 100 nt, synthetic construct
  source 1..100: mol_type = other RNA
gatatcctgacatatctctgcacaaatcacacaaaagatgcctgacctctataggatccacagggagggggcatttcaatatatcggaactctaatcatc

SEQ ID NO: 1516 - RNA, 100 nt, synthetic construct
  source 1..100: mol_type = other RNA
gattcagtgacatatctctgcagcgatcacacaaaagatgcctgacctctataggatccacagggagggggcatttcaatatatcggaactctaatcatc

SEQ ID NO: 1517 - RNA, 100 nt, synthetic construct
  source 1..100: mol_type = other RNA
gcgcgtgtgacatatctctgccaaaatcacacaaaagatgcctgacctctataggatccacagggagggggcatttcaatatatcggaactctaatcatc

SEQ ID NO: 1518 - RNA, 100 nt, synthetic construct
  source 1..100: mol_type = other RNA
gatattgtgacatatctctgatgggatcacacaaaagatgcctgacctctataggatccacagggagggggcatttcaatatatcggaactctaatcatc

SEQ ID NO: 1519 - RNA, 100 nt, synthetic construct
  source 1..100: mol_type = other RNA
tcctgcggcccaacgattacgtcgacgcgtgagaatccatctgaattaactcctggcggggctcagccatgctggttcaccgataacctgagattcgaca

SEQ ID NO: 1520 - RNA, 100 nt, synthetic construct
  source 1..100: mol_type = other RNA
tcctgcggcccaacgattacgtcgacgcgtgagaatccatctgaattaactcctggcggggctcagccatgctggttcaccgataacctgatagtcgaca

SEQ ID NO: 1521 - RNA, 100 nt, synthetic construct
  source 1..100: mol_type = other RNA
tcctagaccccaagaggtacgtaagagcgtgctattccatgtaacagaactcctggcggggctcagccatgctggttcaccccgaacctgaaattcgaca

SEQ ID NO: 1522 - RNA, 100 nt, synthetic construct
  source 1..100: mol_type = other RNA
tcctagaccccaagaggtacgtaagagcgtgctattccatgtaacagaactcctggcggggctcagccatgctggttcaccccgaacctgatagtcgaca

SEQ ID NO: 1523 - RNA, 100 nt, synthetic construct
  source 1..100: mol_type = other RNA
tccatacccccatgacgtacggtacagcgtccacttccaagtgtccgaactcctggcggggctcagccatgctggttcattctggacctgactctcgaca

SEQ ID NO: 1524 - RNA, 100 nt, synthetic construct
  source 1..100: mol_type = other RNA
tccatacccccatgacgtacggtacagcgtccacttccaagtgtccgaactcctggcggggctcagccatgctggttcattctggacctgatagtcgaca

SEQ ID NO: 1525 - RNA, 100 nt, synthetic construct
  source 1..100: mol_type = other RNA
tcggctccccctaaccgtaccagccagcgaattcttcccctgtctcgaactcctggcggggctcagccatgctggttcacgcgcgacctgacactcgaca

SEQ ID NO: 1526 - RNA, 100 nt, synthetic construct
  source 1..100: mol_type = other RNA
tcggctccccctaaccgtaccagccagcgaattcttcccctgtctcgaactcctggcggggctcagccatgctggttcacgcgcgacctgatagtcgaca

SEQ ID NO: 1527 - RNA, 100 nt, synthetic construct
  source 1..100: mol_type = other RNA
tcctgtcccaacacccgtcattcccagacagatcttatgcttcttcgaactcctggcggggctcagccatgctggttcaccgaagacctgagcatcgaca

SEQ ID NO: 1528 - RNA, 100 nt, synthetic construct
  source 1..100: mol_type = other RNA
tcctgtcccaacacccgtcattcccagacagatcttatgcttcttcgaactcctggcggggctcagccatgctggttcaccgaagacctgatagtcgaca

SEQ ID NO: 1529 - RNA, 100 nt, synthetic construct
  source 1..100: mol_type = other RNA
tcctgtccagaaacccgctagtcccaagatgatctgagacgacttcgaactcctggcggggctcagccatgctggttcatgtctaacctgagattcgaca

SEQ ID NO: 1530 - RNA, 100 nt, synthetic construct
  source 1..100: mol_type = other RNA
tcctgtccagaaacccgctagtcccaagatgatctgagacgacttcgaactcctggcggggctcagccatgctggttcatgtctaacctgatagtcgaca

SEQ ID NO: 1531 - RNA, 100 nt, synthetic construct
  source 1..100: mol_type = other RNA
tcctgtcggacaaccccgccgtccctcagtgatcgaagtgcacttcgaactcctggcggggctcagccatgctggttcatcatagacctgaatatcgaca

SEQ ID NO: 1532 - RNA, 100 nt, synthetic construct
  source 1..100: mol_type = other RNA
tcctgtcggacaaccccgccgtccctcagtgatcgaagtgcacttcgaactcctggcggggctcagccatgctggttcatcatagacctgatagtcgaca

SEQ ID NO: 1533 - RNA, 100 nt, synthetic construct
  source 1..100: mol_type = other RNA
tcctgtaggccaaccaggacgtccgcccgtgatgaagattcacttcgaactcctggcggggctcagccatgctggttcaccttggacctgaatttcgaca

SEQ ID NO: 1534 - RNA, 100 nt, synthetic construct
  source 1..100: mol_type = other RNA
tcctgtaggccaaccaggacgtccgcccgtgatgaagattcacttcgaactcctggcggggctcagccatgctggttcaccttggacctgatagtcgaca

SEQ ID NO: 1535 - RNA, 100 nt, synthetic construct
  source 1..100: mol_type = other RNA
tcctgcaacccaacagatacgtcggtgcgtgagggcagatcacttcgaactcctggcggggctcagccatgctggttcacaacgaacctgactctcgaca

SEQ ID NO: 1536 - RNA, 100 nt, synthetic construct
  source 1..100: mol_type = other RNA
tcctgcaacccaacagatacgtcggtgcgtgagggcagatcacttcgaactcctggcggggctcagccatgctggttcacaacgaacctgatagtcgaca

SEQ ID NO: 1537 - RNA, 100 nt, synthetic construct
  source 1..100: mol_type = other RNA
tcctacaccccaagaggtacgtgagagcgtgcgggagcatcacttcgaactcctggcggggctcagccatgctggttcactataaacctgacaatcgaca

SEQ ID NO: 1538 - RNA, 100 nt, synthetic construct
  source 1..100: mol_type = other RNA
tcctacaccccaagaggtacgtgagagcgtgcgggagcatcacttcgaactcctggcggggctcagccatgctggttcactataaacctgatagtcgaca

SEQ ID NO: 1539 - RNA, 100 nt, synthetic construct
  source 1..100: mol_type = other RNA
tccacacccccacaacgtacggcacagcgtaccgcaccatcacttcgaactcctggcggggctcagccatgctggttcatgccagacctgacattcgaca

SEQ ID NO: 1540 - RNA, 100 nt, synthetic construct
  source 1..100: mol_type = other RNA
tccacacccccacaacgtacggcacagcgtaccgcaccatcacttcgaactcctggcggggctcagccatgctggttcatgccagacctgatagtcgaca

SEQ ID NO: 1541 - RNA, 100 nt, synthetic construct
  source 1..100: mol_type = other RNA
tcctgtcccgacacccgtttctcccagagcttacttccatcacttcgaactcctggcggggctcagccatgctggttcaccataaacctgagtctcgaca

SEQ ID NO: 1542 - RNA, 100 nt, synthetic construct
  source 1..100: mol_type = other RNA
tcctgtcccgacacccgtttctcccagagcttacttccatcacttcgaactcctggcggggctcagccatgctggttcaccataaacctgatagtcgaca

SEQ ID NO: 1543 - RNA, 100 nt, synthetic construct
  source 1..100: mol_type = other RNA
tcctgtccagaaacccgcaagtcccaaatacttcttccatcacttcgaactcctggcggggctcagccatgctggttcacacacaacctgaacctcgaca

SEQ ID NO: 1544 - RNA, 100 nt, synthetic construct
  source 1..100: mol_type = other RNA
tcctgtccagaaacccgcaagtcccaaatacttcttccatcacttcgaactcctggcggggctcagccatgctggttcacacacaacctgatagtcgaca

SEQ ID NO: 1545 - RNA, 100 nt, synthetic construct
  source 1..100: mol_type = other RNA
tcctgtcaggcaacccacccgtccccaccatatcttccatcacttcgaactcctggcggggctcagccatgctggttcatgataaacctgaccctcgaca

SEQ ID NO: 1546 - RNA, 100 nt, synthetic construct
  source 1..100: mol_type = other RNA
tcctgtcaggcaacccacccgtccccaccatatcttccatcacttcgaactcctggcggggctcagccatgctggttcatgataaacctgatagtcgaca

SEQ ID NO: 1547 - RNA, 100 nt, synthetic construct
  source 1..100: mol_type = other RNA
tcctgtcgaacaacccatccgtcccttagtgatccggcatcacggatttctcctggcggggctcagccatgctggttcaacgacttcctgatagtcgaca

SEQ ID NO: 1548 - RNA, 100 nt, synthetic construct
  source 1..100: mol_type = other RNA
tcctgtagaccaaccaccacgtccacccgtgatgacccatcagcgtatactcctggcggggctcagccatgctggttcaactcgatcctgatagtcgaca

SEQ ID NO: 1549 - RNA, 100 nt, synthetic construct
  source 1..100: mol_type = other RNA
tcctgacacccaacagctacgtcgatgcgtgaagctccatctcagtaaactcctggcggggctcagccatgctggttcaacctgttcctgatagtcgaca

SEQ ID NO: 1550 - RNA, 100 nt, synthetic construct
  source 1..100: mol_type = other RNA
tcctcaaccccaaggggtacgtaagagcgtgttattccatataagagaactcctggcggggctcagccatgctggttcaacctcttcctgatttgcgaca

SEQ ID NO: 1551 - RNA, 100 nt, synthetic construct
  source 1..100: mol_type = other RNA
tcctcaaccccaaggggtacgtaagagcgtgttattccatataagagaactcctggcggggctcagccatgctggttcaacctcttcctgatagtcgaca

SEQ ID NO: 1552 - RNA, 100 nt, synthetic construct
  source 1..100: mol_type = other RNA
tccgggcccccatcacgtacggggcagcgtttacttccagggaggcgaactcctggcggggctcagccatgctggttcaatatcttcctgatccacgaca

SEQ ID NO: 1553 - RNA, 100 nt, synthetic construct
  source 1..100: mol_type = other RNA
tccgggcccccatcacgtacggggcagcgtttacttccagggaggcgaactcctggcggggctcagccatgctggttcaatatcttcctgatagtcgaca

SEQ ID NO: 1554 - RNA, 100 nt, synthetic construct
  source 1..100: mol_type = other RNA
tcagatccccctaaccgtaccgaccagcgacctcttcctgccgatcgaactcctggcggggctcagccatgctggttcaatgaggtcctgatcaccgaca

SEQ ID NO: 1555 - RNA, 100 nt, synthetic construct
  source 1..100: mol_type = other RNA
tcagatccccctaaccgtaccgaccagcgacctcttcctgccgatcgaactcctggcggggctcagccatgctggttcaatgaggtcctgatagtcgaca

SEQ ID NO: 1556 - RNA, 100 nt, synthetic construct
  source 1..100: mol_type = other RNA
tcctgtcccagtacccgtctctcccagatcgatcttgactgtcttcgaactcctggcggggctcagccatgctggttcaacccggtcctgattaacgaca

SEQ ID NO: 1557 - RNA, 100 nt, synthetic construct
  source 1..100: mol_type = other RNA
tcctgtaggccaaccgaaacgtccgcccgtgatgcgagttcacttcgaactcctggcggggctcagccatgctggttcaaccccatcctgatttccgaca

SEQ ID NO: 1558 - RNA, 100 nt, synthetic construct
  source 1..100: mol_type = other RNA
tcctgtaggccaaccgaaacgtccgcccgtgatgcgagttcacttcgaactcctggcggggctcagccatgctggttcaaccccatcctgatagtcgaca

SEQ ID NO: 1559 - RNA, 100 nt, synthetic construct
  source 1..100: mol_type = other RNA
tcctggcacccaacgactacgtcgacgcgtgaagacggatcacttcgaactcctggcggggctcagccatgctggttcaattccatcctgatcaacgaca

SEQ ID NO: 1560 - RNA, 100 nt, synthetic construct
  source 1..100: mol_type = other RNA
tcctggcacccaacgactacgtcgacgcgtgaagacggatcacttcgaactcctggcggggctcagccatgctggttcaattccatcctgatagtcgaca

SEQ ID NO: 1561 - RNA, 100 nt, synthetic construct
  source 1..100: mol_type = other RNA
tccttggccccaaggagtacgtgggagcgtgcggtagcatcacttcgaactcctggcggggctcagccatgctggttcaattggatcctgatctacgaca

SEQ ID NO: 1562 - RNA, 100 nt, synthetic construct
  source 1..100: mol_type = other RNA
tccttggccccaaggagtacgtgggagcgtgcggtagcatcacttcgaactcctggcggggctcagccatgctggttcaattggatcctgatagtcgaca

SEQ ID NO: 1563 - RNA, 100 nt, synthetic construct
  source 1..100: mol_type = other RNA
tccaaacccccatgacgtacgcagcagcgttgcgagccatcacttcgaactcctggcggggctcagccatgctggttcaacttgttcctgattaccgaca

SEQ ID NO: 1564 - RNA, 100 nt, synthetic construct
  source 1..100: mol_type = other RNA
tccaaacccccatgacgtacgcagcagcgttgcgagccatcacttcgaactcctggcggggctcagccatgctggttcaacttgttcctgatagtcgaca

SEQ ID NO: 1565 - RNA, 100 nt, synthetic construct
  source 1..100: mol_type = other RNA
tcctgtcccagtacccgttaatcccagatcttccttccatcacttcgaactcctggcggggctcagccatgctggttcaacgctgtcctgatttacgaca

SEQ ID NO: 1566 - RNA, 100 nt, synthetic construct
  source 1..100: mol_type = other RNA
tcctgtccggaaacccgctggtcccattatcttcttccatcacttcgaactcctggcggggctcagccatgctggttcaatcaagtcctgatttccgaca

SEQ ID NO: 1567 - RNA, 100 nt, synthetic construct
  source 1..100: mol_type = other RNA
tcctgtccggaaacccgctggtcccattatcttcttccatcacttcgaactcctggcggggctcagccatgctggttcaatcaagtcctgatagtcgaca

SEQ ID NO: 1568 - RNA, 100 nt, synthetic construct
  source 1..100: mol_type = other RNA
tcctaagccccaaggagtacgtgggagcgtgtgattccatagaacagaactcctggcggggctcagccatgctggttcaaaacaatgctgatataggaca

SEQ ID NO: 1569 - RNA, 100 nt, synthetic construct
  source 1..100: mol_type = other RNA
tcctaagccccaaggagtacgtgggagcgtgtgattccatagaacagaactcctggcggggctcagccatgctggttcaaaacaatgctgatagtcgaca

SEQ ID NO: 1570 - RNA, 100 nt, synthetic construct
  source 1..100: mol_type = other RNA
tccgaccccccacagcgtacggagcagcgtaaccttccagacaaacgaactcctggcggggctcagccatgctggttcaaaataatgctgatataagaca

SEQ ID NO: 1571 - RNA, 100 nt, synthetic construct
  source 1..100: mol_type = other RNA
tccgaccccccacagcgtacggagcagcgtaaccttccagacaaacgaactcctggcggggctcagccatgctggttcaaaataatgctgatagtcgaca

SEQ ID NO: 1572 - RNA, 100 nt, synthetic construct
  source 1..100: mol_type = other RNA
tcagatccccccaaccgtactaaccagcgaattcttcccggggatcgaactcctggcggggctcagccatgctggttcaaacgagtgctgataacggaca

SEQ ID NO: 1573 - RNA, 100 nt, synthetic construct
  source 1..100: mol_type = other RNA
tcagatccccccaaccgtactaaccagcgaattcttcccggggatcgaactcctggcggggctcagccatgctggttcaaacgagtgctgatagtcgaca

SEQ ID NO: 1574 - RNA, 100 nt, synthetic construct
  source 1..100: mol_type = other RNA
tcctgtccgggaacccgccggtcccataatgatctcatgaaacttcgaactcctggcggggctcagccatgctggttcaaacatgaactgatatgagaca

SEQ ID NO: 1575 - RNA, 100 nt, synthetic construct
  source 1..100: mol_type = other RNA
tcctgtccgggaacccgccggtcccataatgatctcatgaaacttcgaactcctggcggggctcagccatgctggttcaaacatgaactgatagtcgaca

SEQ ID NO: 1576 - RNA, 100 nt, synthetic construct
  source 1..100: mol_type = other RNA
tcctgtcgagcaaccccatcgtcccccggtgatcacaaaccacttcgaactcctggcggggctcagccatgctggttcaaatctatactgatacgagaca

SEQ ID NO: 1577 - RNA, 100 nt, synthetic construct
  source 1..100: mol_type = other RNA
tcctgtcgagcaaccccatcgtcccccggtgatcacaaaccacttcgaactcctggcggggctcagccatgctggttcaaatctatactgatagtcgaca

SEQ ID NO: 1578 - RNA, 100 nt, synthetic construct
  source 1..100: mol_type = other RNA
tcctgtgggccaaccgtgacgtccatccgtgatgacggctcacttcgaactcctggcggggctcagccatgctggttcaaactggtgctgataaaagaca

SEQ ID NO: 1579 - RNA, 100 nt, synthetic construct
  source 1..100: mol_type = other RNA
tcctgtgggccaaccgtgacgtccatccgtgatgacggctcacttcgaactcctggcggggctcagccatgctggttcaaactggtgctgatagtcgaca

SEQ ID NO: 1580 - RNA, 100 nt, synthetic construct
  source 1..100: mol_type = other RNA
tcctggaacccaacagctacgtcagcgcgtgagaccagatcacttcgaactcctggcggggctcagccatgctggttcaaactgatgctgataatagaca

SEQ ID NO: 1581 - RNA, 100 nt, synthetic construct
  source 1..100: mol_type = other RNA
tcctggaacccaacagctacgtcagcgcgtgagaccagatcacttcgaactcctggcggggctcagccatgctggttcaaactgatgctgatagtcgaca

SEQ ID NO: 1582 - RNA, 100 nt, synthetic construct
  source 1..100: mol_type = other RNA
tcctacaccccaagaagtacgtgggagcgtgccaacacatcacttcgaactcctggcggggctcagccatgctggttcaaaatactgctgatatgagaca

SEQ ID NO: 1583 - RNA, 100 nt, synthetic construct
  source 1..100: mol_type = other RNA
tcctacaccccaagaagtacgtgggagcgtgccaacacatcacttcgaactcctggcggggctcagccatgctggttcaaaatactgctgatagtcgaca

SEQ ID NO: 1584 - RNA, 100 nt, synthetic construct
  source 1..100: mol_type = other RNA
tcccaacccccacggcgtacggagcagcgtccgtagccatcacttcgaactcctggcggggctcagccatgctggttcaaaaacgtgctgatacaggaca

SEQ ID NO: 1585 - RNA, 100 nt, synthetic construct
  source 1..100: mol_type = other RNA
tcccaacccccacggcgtacggagcagcgtccgtagccatcacttcgaactcctggcggggctcagccatgctggttcaaaaacgtgctgatagtcgaca

SEQ ID NO: 1586 - RNA, 100 nt, synthetic construct
  source 1..100: mol_type = other RNA
tcctgtcccggtacccgttattcccaggccttccttccatcacttcgaactcctggcggggctcagccatgctggttcaaacaggtgctgatatgagaca

SEQ ID NO: 1587 - RNA, 100 nt, synthetic construct
  source 1..100: mol_type = other RNA
tcctgtccggaaacccgatagtcccactaagttcttccatcacttcgaactcctggcggggctcagccatgctggttcaaacccttactgataaaggaca

SEQ ID NO: 1588 - RNA, 100 nt, synthetic construct
  source 1..100: mol_type = other RNA
tcctgtccggaaacccgatagtcccactaagttcttccatcacttcgaactcctggcggggctcagccatgctggttcaaacccttactgatagtcgaca

SEQ ID NO: 1589 - RNA, 100 nt, synthetic construct
  source 1..100: mol_type = other RNA
tcagctcccccttgccgtacccaccagcgcattcttcctaccagtcgaactcctggcggggctcagccatgctggttcaaagaactagtgatagtcgaca

SEQ ID NO: 1590 - RNA, 100 nt, synthetic construct
  source 1..100: mol_type = other RNA
tcctgtcgaacaacccaaccgtcccttggtgatccgtgagcacttcgaactcctggcggggctcagccatgctggttcaaaggtagtatgatagggaaca

SEQ ID NO: 1591 - RNA, 100 nt, synthetic construct
  source 1..100: mol_type = other RNA
tcctgtgggccaaccgacacgtccgcccgtgataaagtttcacttcgaactcctggcggggctcagccatgctggttcaaagacgtagtgatagggtaca

SEQ ID NO: 1592 - RNA, 100 nt, synthetic construct
  source 1..100: mol_type = other RNA
tcctgtgggccaaccgacacgtccgcccgtgataaagtttcacttcgaactcctggcggggctcagccatgctggttcaaagacgtagtgatagtcgaca

SEQ ID NO: 1593 - RNA, 100 nt, synthetic construct
  source 1..100: mol_type = other RNA
tcctgacacccaacaattacgtcggtgcgtgagaaaggatcacttcgaactcctggcggggctcagccatgctggttcaaagcaggtatgatagggaaca

SEQ ID NO: 1594 - RNA, 100 nt, synthetic construct
  source 1..100: mol_type = other RNA
tccttagccccaagaggtacgtgagagcgtgcggaagcatcacttcgaactcctggcggggctcagccatgctggttcaaaggagaaatgatagggtaca

SEQ ID NO: 1595 - RNA, 100 nt, synthetic construct
  source 1..100: mol_type = other RNA
tccttagccccaagaggtacgtgagagcgtgcggaagcatcacttcgaactcctggcggggctcagccatgctggttcaaaggagaaatgatagtcgaca

SEQ ID NO: 1596 - RNA, 100 nt, synthetic construct
  source 1..100: mol_type = other RNA
tcctgtccgggaacccgctagtcccacccccctcttccatcacttcgaactcctggcggggctcagccatgctggttcaaagcaaaaatgatagggtaca

SEQ ID NO: 1597 - RNA, 100 nt, synthetic construct
  source 1..100: mol_type = other RNA
tcctgtccgggaacccgctagtcccacccccctcttccatcacttcgaactcctggcggggctcagccatgctggttcaaagcaaaaatgatagtcgaca

SEQ ID NO: 1598 - RNA, 100 nt, synthetic construct
  source 1..100: mol_type = other RNA
tcctgtcagacaacccactcgtccccctcttatcttccatcacttcgaactcctggcggggctcagccatgctggttcaaagagtgggtgatagggtaca

SEQ ID NO: 1599 - RNA, 100 nt, synthetic construct
  source 1..100: mol_type = other RNA
tcctgtcagacaacccactcgtccccctcttatcttccatcacttcgaactcctggcggggctcagccatgctggttcaaagagtgggtgatagtcgaca

SEQ ID NO: 1600 - RNA, 100 nt, synthetic construct
  source 1..100: mol_type = other RNA
tccatacccccatagcgtacgaaacagcgtttacttccacgtagacgaactcctggcggggctcagccatgctattagtaagttctaatgatagggaaca

SEQ ID NO: 1601 - RNA, 100 nt, synthetic construct
  source 1..100: mol_type = other RNA
tcctgaagcccaacggttacgtcagcgcgtgacaaaagatcacttcgaactcctggcggggctcagccatgctaaccgtaagttctggtgatagggtaca

SEQ ID NO: 1602 - RNA, 100 nt, synthetic construct
  source 1..100: mol_type = other RNA
tcctgtccaggaacccgatggtcccaagactctcttccatcacttcgaactcctggcggggctcagccatgctacgtataagttctaatgatagggtaca

SEQ ID NO: 1603 - RNA, 100 nt, synthetic construct
  source 1..100: mol_type = other RNA
tcctgtaggccaaccatgacgtccaaacgtgatgagccatcaaggtatactcctggcggggctcagccatgctgtgagatagttcacctgatagtcgaca

SEQ ID NO: 1604 - RNA, 100 nt, synthetic construct
  source 1..100: mol_type = other RNA
tcctgaggcccaacagatacgtcgatgcgtgagcgtccatctgtccaaactcctggcggggctcagccatgctgcagtctagttcagacgatagtcgaca

SEQ ID NO: 1605 - RNA, 100 nt, synthetic construct
  source 1..100: mol_type = other RNA
tcctgaggcccaacagatacgtcgatgcgtgagcgtccatctgtccaaactcctggcggggctcagccatgctgcagtctagttcacctgatagtcgaca

SEQ ID NO: 1606 - RNA, 100 nt, synthetic construct
  source 1..100: mol_type = other RNA
tcctcagccccaaggggtacgtaggagcgtgtaattccatattcgggaactcctggcggggctcagccatgctgcacgctagttcaggggatagtcgaca

SEQ ID NO: 1607 - RNA, 100 nt, synthetic construct
  source 1..100: mol_type = other RNA
tcctcagccccaaggggtacgtaggagcgtgtaattccatattcgggaactcctggcggggctcagccatgctgcacgctagttcacctgatagtcgaca

SEQ ID NO: 1608 - RNA, 100 nt, synthetic construct
  source 1..100: mol_type = other RNA
tccggacccccatggcgtacgagacagcgtccccttccagcgtaccgaactcctggcggggctcagccatgctgatagtcagttcaggggatagtcgaca

SEQ ID NO: 1609 - RNA, 100 nt, synthetic construct
  source 1..100: mol_type = other RNA
tccggacccccatggcgtacgagacagcgtccccttccagcgtaccgaactcctggcggggctcagccatgctgatagtcagttcacctgatagtcgaca

SEQ ID NO: 1610 - RNA, 100 nt, synthetic construct
  source 1..100: mol_type = other RNA
tcggatcccccttgccgtacttaccagcgggttcttcccgattctcgaactcctggcggggctcagccatgctgtaggatagttcaacagatagtcgaca

SEQ ID NO: 1611 - RNA, 100 nt, synthetic construct
  source 1..100: mol_type = other RNA
tcggatcccccttgccgtacttaccagcgggttcttcccgattctcgaactcctggcggggctcagccatgctgtaggatagttcacctgatagtcgaca

SEQ ID NO: 1612 - RNA, 100 nt, synthetic construct
  source 1..100: mol_type = other RNA
tcctgtcccggtacccgtttctcccaggacgatcttaatggtcttcgaactcctggcggggctcagccatgctgtaggctagttcaagggatagtcgaca

SEQ ID NO: 1613 - RNA, 100 nt, synthetic construct
  source 1..100: mol_type = other RNA
tcctgtccggaaacccgatggtcccatactgatctcaagagacttcgaactcctggcggggctcagccatgctgcgacctagttcaacggatagtcgaca

SEQ ID NO: 1614 - RNA, 100 nt, synthetic construct
  source 1..100: mol_type = other RNA
tcctgtccggaaacccgatggtcccatactgatctcaagagacttcgaactcctggcggggctcagccatgctgcgacctagttcacctgatagtcgaca

SEQ ID NO: 1615 - RNA, 100 nt, synthetic construct
  source 1..100: mol_type = other RNA
tcctgtcgagcaacccttccgtcccttggtgatcctagggcacttcgaactcctggcggggctcagccatgctgtatgttagttcaaaggatagtcgaca

SEQ ID NO: 1616 - RNA, 100 nt, synthetic construct
  source 1..100: mol_type = other RNA
tcctgtcgagcaacccttccgtcccttggtgatcctagggcacttcgaactcctggcggggctcagccatgctgtatgttagttcacctgatagtcgaca

SEQ ID NO: 1617 - RNA, 100 nt, synthetic construct
  source 1..100: mol_type = other RNA
tcctgtacaccaaccaagacgtccgtacgtgataaaagttcacttcgaactcctggcggggctcagccatgctgcaaactagttcaagggatagtcgaca

SEQ ID NO: 1618 - RNA, 100 nt, synthetic construct
  source 1..100: mol_type = other RNA
tcctgtacaccaaccaagacgtccgtacgtgataaaagttcacttcgaactcctggcggggctcagccatgctgcaaactagttcacctgatagtcgaca

SEQ ID NO: 1619 - RNA, 100 nt, synthetic construct
  source 1..100: mol_type = other RNA
tcctggaacccaacagctacgtcgatgcgtgaacaacaatcacttcgaactcctggcggggctcagccatgctgcaatgcagttcaggagatagtcgaca

SEQ ID NO: 1620 - RNA, 100 nt, synthetic construct
  source 1..100: mol_type = other RNA
tcctggaacccaacagctacgtcgatgcgtgaacaacaatcacttcgaactcctggcggggctcagccatgctgcaatgcagttcacctgatagtcgaca

SEQ ID NO: 1621 - RNA, 100 nt, synthetic construct
  source 1..100: mol_type = other RNA
tcctccgccccaagaagtacgtagaagcgtgtttaggcatcacttcgaactcctggcggggctcagccatgctgatggttagttcaagggatagtcgaca

SEQ ID NO: 1622 - RNA, 100 nt, synthetic construct
  source 1..100: mol_type = other RNA
tccgggcccccacgacgtacgggacagcgtcagttgccatcacttcgaactcctggcggggctcagccatgctgaacactagttcaaaagatagtcgaca

SEQ ID NO: 1623 - RNA, 100 nt, synthetic construct
  source 1..100: mol_type = other RNA
tccgggcccccacgacgtacgggacagcgtcagttgccatcacttcgaactcctggcggggctcagccatgctgaacactagttcacctgatagtcgaca

SEQ ID NO: 1624 - RNA, 100 nt, synthetic construct
  source 1..100: mol_type = other RNA
tcaactccccctcaccgtaccgaccagcgccacagtccatcacttcgaactcctggcggggctcagccatgctgtagtgtagttcagaggatagtcgaca

SEQ ID NO: 1625 - RNA, 100 nt, synthetic construct
  source 1..100: mol_type = other RNA
tcaactccccctcaccgtaccgaccagcgccacagtccatcacttcgaactcctggcggggctcagccatgctgtagtgtagttcacctgatagtcgaca

SEQ ID NO: 1626 - RNA, 100 nt, synthetic construct
  source 1..100: mol_type = other RNA
tcctgtcccggtacccgtctttcccaggagtcacttccatcacttcgaactcctggcggggctcagccatgctgatatttagttcaggcgatagtcgaca

SEQ ID NO: 1627 - RNA, 100 nt, synthetic construct
  source 1..100: mol_type = other RNA
tcctgtccaagaacccgctagtcccattctattcttccatcacttcgaactcctggcggggctcagccatgctgaaaattagttcaacggatagtcgaca

SEQ ID NO: 1628 - RNA, 100 nt, synthetic construct
  source 1..100: mol_type = other RNA
tcctgtggaccaaccaccacgtccaatcgtgatgcaccatcaagagttactcctggcggggctcagccatgctggcgggccgttcacctgatagtcgaca

SEQ ID NO: 1629 - RNA, 100 nt, synthetic construct
  source 1..100: mol_type = other RNA
tcctgaagcccaacgactacgtcggcgcgtgacactccatctaagacaactcctggcggggctcagccatgctggagacttgttcacctgatagtcgaca

SEQ ID NO: 1630 - RNA, 100 nt, synthetic construct
  source 1..100: mol_type = other RNA
tcctacaccccaaggggtacgtggaagcgtgctattccatgtgccagaactcctggcggggctcagccatgctgggggaccgttcacataatagtcgaca

SEQ ID NO: 1631 - RNA, 100 nt, synthetic construct
  source 1..100: mol_type = other RNA
tcctacaccccaaggggtacgtggaagcgtgctattccatgtgccagaactcctggcggggctcagccatgctgggggaccgttcacctgatagtcgaca

SEQ ID NO: 1632 - RNA, 100 nt, synthetic construct
  source 1..100: mol_type = other RNA
tccgaacccccataacgtacggagcagcgtacccttccaaaaaaacgaactcctggcggggctcagccatgctggggggccgttcacgcaatagtcgaca

SEQ ID NO: 1633 - RNA, 100 nt, synthetic construct
  source 1..100: mol_type = other RNA
tccgaacccccataacgtacggagcagcgtacccttccaaaaaaacgaactcctggcggggctcagccatgctggggggccgttcacctgatagtcgaca

SEQ ID NO: 1634 - RNA, 100 nt, synthetic construct
  source 1..100: mol_type = other RNA
tcgcatcccccttaccgtactagccagcgctctcttcccggcagtcgaactcctggcggggctcagccatgctggcaatctgttcacgccatagtcgaca

SEQ ID NO: 1635 - RNA, 100 nt, synthetic construct
  source 1..100: mol_type = other RNA
tcctgtcccagcacccgtcattcccaggaggatcttgaggaccttcgaactcctggcggggctcagccatgctgggaatccgttcacggcatagtcgaca

SEQ ID NO: 1636 - RNA, 100 nt, synthetic construct
  source 1..100: mol_type = other RNA
tcctgtcccagcacccgtcattcccaggaggatcttgaggaccttcgaactcctggcggggctcagccatgctgggaatccgttcacctgatagtcgaca

SEQ ID NO: 1637 - RNA, 100 nt, synthetic construct
  source 1..100: mol_type = other RNA
tcctgtccggaaacccgccggtcccatattgatctataaaaacttcgaactcctggcggggctcagccatgctggcaactcgttcacattatagtcgaca

SEQ ID NO: 1638 - RNA, 100 nt, synthetic construct
  source 1..100: mol_type = other RNA
tcctgtccggaaacccgccggtcccatattgatctataaaaacttcgaactcctggcggggctcagccatgctggcaactcgttcacctgatagtcgaca

SEQ ID NO: 1639 - RNA, 100 nt, synthetic construct
  source 1..100: mol_type = other RNA
tcctgtcgggcaacccaatcgtccctcggtgatcgataaacacttcgaactcctggcggggctcagccatgctggaaggccgttcacggcatagtcgaca

SEQ ID NO: 1640 - RNA, 100 nt, synthetic construct
  source 1..100: mol_type = other RNA
tcctgtcgggcaacccaatcgtccctcggtgatcgataaacacttcgaactcctggcggggctcagccatgctggaaggccgttcacctgatagtcgaca

SEQ ID NO: 1641 - RNA, 100 nt, synthetic construct
  source 1..100: mol_type = other RNA
tcctgtgaaccaaccgagacgtccatccgtgatagatgttcacttcgaactcctggcggggctcagccatgctggcatgccgttcacggcatagtcgaca

SEQ ID NO: 1642 - RNA, 100 nt, synthetic construct
  source 1..100: mol_type = other RNA
tcctgtgaaccaaccgagacgtccatccgtgatagatgttcacttcgaactcctggcggggctcagccatgctggcatgccgttcacctgatagtcgaca

SEQ ID NO: 1643 - RNA, 100 nt, synthetic construct
  source 1..100: mol_type = other RNA
tcctgaaacccaacaattacgtcggcgcgtgagaagcaatcacttcgaactcctggcggggctcagccatgctggggtcctgttcacgatatagtcgaca

SEQ ID NO: 1644 - RNA, 100 nt, synthetic construct
  source 1..100: mol_type = other RNA
tcctgaaacccaacaattacgtcggcgcgtgagaagcaatcacttcgaactcctggcggggctcagccatgctggggtcctgttcacctgatagtcgaca

SEQ ID NO: 1645 - RNA, 100 nt, synthetic construct
  source 1..100: mol_type = other RNA
tcctttaccccaagaagtacgtaagagcgtgccgtggcatcacttcgaactcctggcggggctcagccatgctggcgtgctgttcacgaaatagtcgaca

SEQ ID NO: 1646 - RNA, 100 nt, synthetic construct
  source 1..100: mol_type = other RNA
tcctttaccccaagaagtacgtaagagcgtgccgtggcatcacttcgaactcctggcggggctcagccatgctggcgtgctgttcacctgatagtcgaca

SEQ ID NO: 1647 - RNA, 100 nt, synthetic construct
  source 1..100: mol_type = other RNA
tccatccccccataacgtacgcaacagcgtttggcgccatcacttcgaactcctggcggggctcagccatgctggctgtacgttcacataatagtcgaca

SEQ ID NO: 1648 - RNA, 100 nt, synthetic construct
  source 1..100: mol_type = other RNA
tccatccccccataacgtacgcaacagcgtttggcgccatcacttcgaactcctggcggggctcagccatgctggctgtacgttcacctgatagtcgaca

SEQ ID NO: 1649 - RNA, 100 nt, synthetic construct
  source 1..100: mol_type = other RNA
tcatatcccccttaccgtactgaccagcgcaacgctccatcacttcgaactcctggcggggctcagccatgctgggctctcgttcacagcatagtcgaca

SEQ ID NO: 1650 - RNA, 100 nt, synthetic construct
  source 1..100: mol_type = other RNA
tcatatcccccttaccgtactgaccagcgcaacgctccatcacttcgaactcctggcggggctcagccatgctgggctctcgttcacctgatagtcgaca

SEQ ID NO: 1651 - RNA, 100 nt, synthetic construct
  source 1..100: mol_type = other RNA
tcctgtcccgacacccgtcattcccaggattcacttccatcacttcgaactcctggcggggctcagccatgctggggttccgttcacacaatagtcgaca

SEQ ID NO: 1652 - RNA, 100 nt, synthetic construct
  source 1..100: mol_type = other RNA
tcctgtcccgacacccgtcattcccaggattcacttccatcacttcgaactcctggcggggctcagccatgctggggttccgttcacctgatagtcgaca

SEQ ID NO: 1653 - RNA, 100 nt, synthetic construct
  source 1..100: mol_type = other RNA
tcctgtccgagaacccggtagtcccacaacactcttccatcacttcgaactcctggcggggctcagccatgctggcgacgcgttcacacaatagtcgaca

SEQ ID NO: 1654 - RNA, 100 nt, synthetic construct
  source 1..100: mol_type = other RNA
tcctgtccgagaacccggtagtcccacaacactcttccatcacttcgaactcctggcggggctcagccatgctggcgacgcgttcacctgatagtcgaca

SEQ ID NO: 1655 - RNA, 100 nt, synthetic construct
  source 1..100: mol_type = other RNA
tcctgtccaagaacccgccggtcccatactgatctaagatcactacctaatcctggcggggctcagccatgctggtggagctttcaccatttagtcgaca

SEQ ID NO: 1656 - RNA, 100 nt, synthetic construct
  source 1..100: mol_type = other RNA
tcctgtccaagaacccgccggtcccatactgatctaagatcactacctaatcctggcggggctcagccatgctggtggagctttcacctgatagtcgaca

SEQ ID NO: 1657 - RNA, 100 nt, synthetic construct
  source 1..100: mol_type = other RNA
tcctgtcaaacaaccctatcgtcccttggtgatcatacatcaccctaatctcctggcggggctcagccatgctggtgcttctttcacctgatagtcgaca

SEQ ID NO: 1658 - RNA, 100 nt, synthetic construct
  source 1..100: mol_type = other RNA
tcctgtggaccaaccgccacgtccgtccgtgatgccccatcaggagtcactcctggcggggctcagccatgctggtctgtatttcaccaactagtcgaca

SEQ ID NO: 1659 - RNA, 100 nt, synthetic construct
  source 1..100: mol_type = other RNA
tcctgtggaccaaccgccacgtccgtccgtgatgccccatcaggagtcactcctggcggggctcagccatgctggtctgtatttcacctgatagtcgaca

SEQ ID NO: 1660 - RNA, 100 nt, synthetic construct
  source 1..100: mol_type = other RNA
tcctgaagcccaacgattacgtcagtgcgtgacgatccatctttgtaaactcctggcggggctcagccatgctggtaccactttcaccatctagtcgaca

SEQ ID NO: 1661 - RNA, 100 nt, synthetic construct
  source 1..100: mol_type = other RNA
tcctgaagcccaacgattacgtcagtgcgtgacgatccatctttgtaaactcctggcggggctcagccatgctggtaccactttcacctgatagtcgaca

SEQ ID NO: 1662 - RNA, 100 nt, synthetic construct
  source 1..100: mol_type = other RNA
tcccaacccccacgacgtacgcggcagcgttaccttccagacaaccgaactcctggcggggctcagccatgctggtatggcattcaccatttagtcgaca

SEQ ID NO: 1663 - RNA, 100 nt, synthetic construct
  source 1..100: mol_type = other RNA
tcccaacccccacgacgtacgcggcagcgttaccttccagacaaccgaactcctggcggggctcagccatgctggtatggcattcacctgatagtcgaca

SEQ ID NO: 1664 - RNA, 100 nt, synthetic construct
  source 1..100: mol_type = other RNA
tcgattccccctcgccgtacacgccagcgctttcttccccgtagtcgaactcctggcggggctcagccatgctggtctggccttcaccacttagtcgaca

SEQ ID NO: 1665 - RNA, 100 nt, synthetic construct
  source 1..100: mol_type = other RNA
tcgattccccctcgccgtacacgccagcgctttcttccccgtagtcgaactcctggcggggctcagccatgctggtctggccttcacctgatagtcgaca

SEQ ID NO: 1666 - RNA, 100 nt, synthetic construct
  source 1..100: mol_type = other RNA
tcctgtcccggcacccgtcaatcccagatcgatcttgatggtcttcgaactcctggcggggctcagccatgctggtccctgattcaccgattagtcgaca

SEQ ID NO: 1667 - RNA, 100 nt, synthetic construct
  source 1..100: mol_type = other RNA
tcctgtcccggcacccgtcaatcccagatcgatcttgatggtcttcgaactcctggcggggctcagccatgctggtccctgattcacctgatagtcgaca

SEQ ID NO: 1668 - RNA, 100 nt, synthetic construct
  source 1..100: mol_type = other RNA
tcctgtccagaaacccggcagtcccatattgatctataataacttcgaactcctggcggggctcagccatgctggtatttgtttcaccccttagtcgaca

SEQ ID NO: 1669 - RNA, 100 nt, synthetic construct
  source 1..100: mol_type = other RNA
tcctgtccagaaacccggcagtcccatattgatctataataacttcgaactcctggcggggctcagccatgctggtatttgtttcacctgatagtcgaca

SEQ ID NO: 1670 - RNA, 100 nt, synthetic construct
  source 1..100: mol_type = other RNA
tcctgtcaaacaacccccccgtcccttagtgatcacgttccacttcgaactcctggcggggctcagccatgctggtggtcgtttcaccgcctagtcgaca

SEQ ID NO: 1671 - RNA, 100 nt, synthetic construct
  source 1..100: mol_type = other RNA
tcctgtcaaacaacccccccgtcccttagtgatcacgttccacttcgaactcctggcggggctcagccatgctggtggtcgtttcacctgatagtcgaca

SEQ ID NO: 1672 - RNA, 100 nt, synthetic construct
  source 1..100: mol_type = other RNA
tcctgtggaccaaccgagacgtccgtacgtgatgatgattcacttcgaactcctggcggggctcagccatgctggtctttttttcaccacttagtcgaca

SEQ ID NO: 1673 - RNA, 100 nt, synthetic construct
  source 1..100: mol_type = other RNA
tcctgtggaccaaccgagacgtccgtacgtgatgatgattcacttcgaactcctggcggggctcagccatgctggtctttttttcacctgatagtcgaca

SEQ ID NO: 1674 - RNA, 100 nt, synthetic construct
  source 1..100: mol_type = other RNA
tcctggcacccaacgattacgtcaacgcgtgaagcaggatcacttcgaactcctggcggggctcagccatgctggtgtgcatttcaccctttagtcgaca

SEQ ID NO: 1675 - RNA, 100 nt, synthetic construct
  source 1..100: mol_type = other RNA
tcctggcacccaacgattacgtcaacgcgtgaagcaggatcacttcgaactcctggcggggctcagccatgctggtgtgcatttcacctgatagtcgaca

SEQ ID NO: 1676 - RNA, 100 nt, synthetic construct
  source 1..100: mol_type = other RNA
tccggacccccatagcgtacgacacagcgtagcgaaccatcacttcgaactcctggcggggctcagccatgctggtgtatacttcaccatctagtcgaca

SEQ ID NO: 1677 - RNA, 100 nt, synthetic construct
  source 1..100: mol_type = other RNA
tccggacccccatagcgtacgacacagcgtagcgaaccatcacttcgaactcctggcggggctcagccatgctggtgtatacttcacctgatagtcgaca

SEQ ID NO: 1678 - RNA, 100 nt, synthetic construct
  source 1..100: mol_type = other RNA
tcggatcccccttgccgtacaagccagcgaactaatccatcacttcgaactcctggcggggctcagccatgctggtgttgctttcaccatttagtcgaca

SEQ ID NO: 1679 - RNA, 100 nt, synthetic construct
  source 1..100: mol_type = other RNA
tcggatcccccttgccgtacaagccagcgaactaatccatcacttcgaactcctggcggggctcagccatgctggtgttgctttcacctgatagtcgaca

SEQ ID NO: 1680 - RNA, 100 nt, synthetic construct
  source 1..100: mol_type = other RNA
tcctgtcccgatacccgtctctcccaggccttgcttccatcacttcgaactcctggcggggctcagccatgctggtgagttattcaccctttagtcgaca

SEQ ID NO: 1681 - RNA, 100 nt, synthetic construct
  source 1..100: mol_type = other RNA
tcctgtcccgatacccgtctctcccaggccttgcttccatcacttcgaactcctggcggggctcagccatgctggtgagttattcacctgatagtcgaca

SEQ ID NO: 1682 - RNA, 100 nt, synthetic construct
  source 1..100: mol_type = other RNA
tcctgtccaggaacccggcggtcccaaaagattcttccatcacttcgaactcctggcggggctcagccatgctggtctacgcttcaccgtttagtcgaca

SEQ ID NO: 1683 - RNA, 100 nt, synthetic construct
  source 1..100: mol_type = other RNA
tcctgtccaggaacccggcggtcccaaaagattcttccatcacttcgaactcctggcggggctcagccatgctggtctacgcttcacctgatagtcgaca

SEQ ID NO: 1684 - RNA, 100 nt, synthetic construct
  source 1..100: mol_type = other RNA
tcctgtcacacaacccagccgtcccccaataatcttccatcacttcgaactcctggcggggctcagccatgctggtgggcgcttcaccccttagtcgaca

SEQ ID NO: 1685 - RNA, 100 nt, synthetic construct
  source 1..100: mol_type = other RNA
tcctgtcacacaacccagccgtcccccaataatcttccatcacttcgaactcctggcggggctcagccatgctggtgggcgcttcacctgatagtcgaca

SEQ ID NO: 1686 - RNA, 100 nt, synthetic construct
  source 1..100: mol_type = other RNA
tcctgcagcccaacggatacgtcaacgcgtgaggatccatcttgtataactcctggcggggctcagccatgctggttatgtcatcacctgatagtcgaca

SEQ ID NO: 1687 - RNA, 100 nt, synthetic construct
  source 1..100: mol_type = other RNA
tcctacaccccaaagggtacgtagaagcgtgtagttccatgtagcggaactcctggcggggctcagccatgctggttagcacgtcacctttaagtcgaca

SEQ ID NO: 1688 - RNA, 100 nt, synthetic construct
  source 1..100: mol_type = other RNA
tcctacaccccaaagggtacgtagaagcgtgtagttccatgtagcggaactcctggcggggctcagccatgctggttagcacgtcacctgatagtcgaca

SEQ ID NO: 1689 - RNA, 100 nt, synthetic construct
  source 1..100: mol_type = other RNA
tccaaacccccatggcgtacgacacagcgtttacttccaaacaggcgaactcctggcggggctcagccatgctggttaccccctcacctaacagtcgaca

SEQ ID NO: 1690 - RNA, 100 nt, synthetic construct
  source 1..100: mol_type = other RNA
tccaaacccccatggcgtacgacacagcgtttacttccaaacaggcgaactcctggcggggctcagccatgctggttaccccctcacctgatagtcgaca

SEQ ID NO: 1691 - RNA, 100 nt, synthetic construct
  source 1..100: mol_type = other RNA
tcgcatccccctcgccgtacaggccagcgccctcttccccttggtcgaactcctggcggggctcagccatgctggttagaccctcacctcacagtcgaca

SEQ ID NO: 1692 - RNA, 100 nt, synthetic construct
  source 1..100: mol_type = other RNA
tcctgtcccaacacccgtcattcccaggaagatcttgggggtcttcgaactcctggcggggctcagccatgctggttatatactcacctaagagtcgaca

SEQ ID NO: 1693 - RNA, 100 nt, synthetic construct
  source 1..100: mol_type = other RNA
tcctgtcccaacacccgtcattcccaggaagatcttgggggtcttcgaactcctggcggggctcagccatgctggttatatactcacctgatagtcgaca

SEQ ID NO: 1694 - RNA, 100 nt, synthetic construct
  source 1..100: mol_type = other RNA
tcctgtccacaaacccgatggtcccaatatgatctaagtaaacttcgaactcctggcggggctcagccatgctggttgctccctcaccttacagtcgaca

SEQ ID NO: 1695 - RNA, 100 nt, synthetic construct
  source 1..100: mol_type = other RNA
tcctgtccacaaacccgatggtcccaatatgatctaagtaaacttcgaactcctggcggggctcagccatgctggttgctccctcacctgatagtcgaca

SEQ ID NO: 1696 - RNA, 100 nt, synthetic construct
  source 1..100: mol_type = other RNA
tcctgtcgagcaacccattcgtcccttagtgatcggaggccacttcgaactcctggcggggctcagccatgctggttaacacatcaccttacagtcgaca

SEQ ID NO: 1697 - RNA, 100 nt, synthetic construct
  source 1..100: mol_type = other RNA
tcctgtcgagcaacccattcgtcccttagtgatcggaggccacttcgaactcctggcggggctcagccatgctggttaacacatcacctgatagtcgaca

SEQ ID NO: 1698 - RNA, 100 nt, synthetic construct
  source 1..100: mol_type = other RNA
tcctgtgagccaaccaacacgtccgtacgtgatgctagttcacttcgaactcctggcggggctcagccatgctggttaggtcgtcaccttccagtcgaca

SEQ ID NO: 1699 - RNA, 100 nt, synthetic construct
  source 1..100: mol_type = other RNA
tcctgcgacccaacgattacgtcggtgcgtgaatgcggatcacttcgaactcctggcggggctcagccatgctggttaaaatgtcacctccgagtcgaca

SEQ ID NO: 1700 - RNA, 100 nt, synthetic construct
  source 1..100: mol_type = other RNA
tcctgcgacccaacgattacgtcggtgcgtgaatgcggatcacttcgaactcctggcggggctcagccatgctggttaaaatgtcacctgatagtcgaca

SEQ ID NO: 1701 - RNA, 100 nt, synthetic construct
  source 1..100: mol_type = other RNA
tcctacgccccaaggggtacgtaaaagcgtgccaaagcatcacttcgaactcctggcggggctcagccatgctggttaaatcgtcacctccaagtcgaca

SEQ ID NO: 1702 - RNA, 100 nt, synthetic construct
  source 1..100: mol_type = other RNA
tcctacgccccaaggggtacgtaaaagcgtgccaaagcatcacttcgaactcctggcggggctcagccatgctggttaaatcgtcacctgatagtcgaca

SEQ ID NO: 1703 - RNA, 100 nt, synthetic construct
  source 1..100: mol_type = other RNA
tccatacccccatagcgtacggggcagcgttaatacccatcacttcgaactcctggcggggctcagccatgctggttacttaatcacctctcagtcgaca

SEQ ID NO: 1704 - RNA, 100 nt, synthetic construct
  source 1..100: mol_type = other RNA
tccatacccccatagcgtacggggcagcgttaatacccatcacttcgaactcctggcggggctcagccatgctggttacttaatcacctgatagtcgaca

SEQ ID NO: 1705 - RNA, 100 nt, synthetic construct
  source 1..100: mol_type = other RNA
tcggttccccctaaccgtacataccagcgaccccatccatcacttcgaactcctggcggggctcagccatgctggttgtttcatcacctctgagtcgaca

SEQ ID NO: 1706 - RNA, 100 nt, synthetic construct
  source 1..100: mol_type = other RNA
tcggttccccctaaccgtacataccagcgaccccatccatcacttcgaactcctggcggggctcagccatgctggttgtttcatcacctgatagtcgaca

SEQ ID NO: 1707 - RNA, 100 nt, synthetic construct
  source 1..100: mol_type = other RNA
tcctgtcccaacacccgtctttcccagataatacttccatcacttcgaactcctggcggggctcagccatgctggttaaatcgtcaccttccagtcgaca

SEQ ID NO: 1708 - RNA, 100 nt, synthetic construct
  source 1..100: mol_type = other RNA
tcctgtcccaacacccgtctttcccagataatacttccatcacttcgaactcctggcggggctcagccatgctggttaaatcgtcacctgatagtcgaca

SEQ ID NO: 1709 - RNA, 100 nt, synthetic construct
  source 1..100: mol_type = other RNA
tcctgtccggaaacccgcaagtcccaaattcctcttccatcacttcgaactcctggcggggctcagccatgctggttgtcttatcaccttaaagtcgaca

SEQ ID NO: 1710 - RNA, 100 nt, synthetic construct
  source 1..100: mol_type = other RNA
tcctgtccggaaacccgcaagtcccaaattcctcttccatcacttcgaactcctggcggggctcagccatgctggttgtcttatcacctgatagtcgaca

SEQ ID NO: 1711 - RNA, 100 nt, synthetic construct
  source 1..100: mol_type = other RNA
tcctgtcgaacaaccctttcgtcccctaacaatcttccatcacttcgaactcctggcggggctcagccatgctggttgtaacctcacctatgagtcgaca

SEQ ID NO: 1712 - RNA, 100 nt, synthetic construct
  source 1..100: mol_type = other RNA
tcctgtcgaacaaccctttcgtcccctaacaatcttccatcacttcgaactcctggcggggctcagccatgctggttgtaacctcacctgatagtcgaca

SEQ ID NO: 1713 - RNA, 100 nt, synthetic construct
  source 1..100: mol_type = other RNA
tcctgtccgagaacccgaaagtcccatattgatctaggatcactgcctaatcctggcggggctcagccatgctggttctaccgacacctgatagtcgaca

SEQ ID NO: 1714 - RNA, 100 nt, synthetic construct
  source 1..100: mol_type = other RNA
tcctgtgggccaaccataacgtccgctcgtgatacgccatcaacggctactcctggcggggctcagccatgctggttcctttgccacctgcatgtcgaca

SEQ ID NO: 1715 - RNA, 100 nt, synthetic construct
  source 1..100: mol_type = other RNA
tcctgtgggccaaccataacgtccgctcgtgatacgccatcaacggctactcctggcggggctcagccatgctggttcctttgccacctgatagtcgaca

SEQ ID NO: 1716 - RNA, 100 nt, synthetic construct
  source 1..100: mol_type = other RNA
tcctgacacccaacaactacgtcggtgcgtgagactccatctaggtaaactcctggcggggctcagccatgctggttcttctgacacctgcatgtcgaca

SEQ ID NO: 1717 - RNA, 100 nt, synthetic construct
  source 1..100: mol_type = other RNA
tcctgacacccaacaactacgtcggtgcgtgagactccatctaggtaaactcctggcggggctcagccatgctggttcttctgacacctgatagtcgaca

SEQ ID NO: 1718 - RNA, 100 nt, synthetic construct
  source 1..100: mol_type = other RNA
tcctaaaccccaaagagtacgtgggagcgtgctattccatgtgggagaactcctggcggggctcagccatgctggttcctatcgcacctgtttgtcgaca

SEQ ID NO: 1719 - RNA, 100 nt, synthetic construct
  source 1..100: mol_type = other RNA
tcctaaaccccaaagagtacgtgggagcgtgctattccatgtgggagaactcctggcggggctcagccatgctggttcctatcgcacctgatagtcgaca

SEQ ID NO: 1720 - RNA, 100 nt, synthetic construct
  source 1..100: mol_type = other RNA
tccaagcccccatcacgtacgcggcagcgtctacttccacgtgagcgaactcctggcggggctcagccatgctggttctatacacacctgcgcgtcgaca

SEQ ID NO: 1721 - RNA, 100 nt, synthetic construct
  source 1..100: mol_type = other RNA
tccaagcccccatcacgtacgcggcagcgtctacttccacgtgagcgaactcctggcggggctcagccatgctggttctatacacacctgatagtcgaca

SEQ ID NO: 1722 - RNA, 100 nt, synthetic construct
  source 1..100: mol_type = other RNA
tcctgtcccaatacccgttaatcccagaaggatcttattagtcttcgaactcctggcggggctcagccatgctggttccttacacacctgcgcgtcgaca

SEQ ID NO: 1723 - RNA, 100 nt, synthetic construct
  source 1..100: mol_type = other RNA
tcctgtcccaatacccgttaatcccagaaggatcttattagtcttcgaactcctggcggggctcagccatgctggttccttacacacctgatagtcgaca

SEQ ID NO: 1724 - RNA, 100 nt, synthetic construct
  source 1..100: mol_type = other RNA
tcctgtccaggaacccggaagtcccataatgatctaaattaacttcgaactcctggcggggctcagccatgctggttccccaggcacctgcacgtcgaca

SEQ ID NO: 1725 - RNA, 100 nt, synthetic construct
  source 1..100: mol_type = other RNA
tcctgtccaggaacccggaagtcccataatgatctaaattaacttcgaactcctggcggggctcagccatgctggttccccaggcacctgatagtcgaca

SEQ ID NO: 1726 - RNA, 100 nt, synthetic construct
  source 1..100: mol_type = other RNA
tcctgtcaaacaacccaatcgtcccctggtgatccagttacacttcgaactcctggcggggctcagccatgctggttccccgcacacctgtatgtcgaca

SEQ ID NO: 1727 - RNA, 100 nt, synthetic construct
  source 1..100: mol_type = other RNA
tcctgtcaaacaacccaatcgtcccctggtgatccagttacacttcgaactcctggcggggctcagccatgctggttccccgcacacctgatagtcgaca

SEQ ID NO: 1728 - RNA, 100 nt, synthetic construct
  source 1..100: mol_type = other RNA
tcctgtgggccaaccgcaacgtccaaacgtgatgacggttcacttcgaactcctggcggggctcagccatgctggttccccatacacctgcttgtcgaca

SEQ ID NO: 1729 - RNA, 100 nt, synthetic construct
  source 1..100: mol_type = other RNA
tcctgtgggccaaccgcaacgtccaaacgtgatgacggttcacttcgaactcctggcggggctcagccatgctggttccccatacacctgatagtcgaca

SEQ ID NO: 1730 - RNA, 100 nt, synthetic construct
  source 1..100: mol_type = other RNA
tcctgaaacccaacgaatacgtcggcgcgtgacggacaatcacttcgaactcctggcggggctcagccatgctggttctttcaacacctgtacgtcgaca

SEQ ID NO: 1731 - RNA, 100 nt, synthetic construct
  source 1..100: mol_type = other RNA
tcctgaaacccaacgaatacgtcggcgcgtgacggacaatcacttcgaactcctggcggggctcagccatgctggttctttcaacacctgatagtcgaca

SEQ ID NO: 1732 - RNA, 100 nt, synthetic construct
  source 1..100: mol_type = other RNA
tccttagccccaaaaagtacgtgaaagcgtgtagaagcatcacttcgaactcctggcggggctcagccatgctggttctttcaacacctgatagtcgaca

SEQ ID NO: 1733 - RNA, 100 nt, synthetic construct
  source 1..100: mol_type = other RNA
tccaggcccccataacgtacgaagcagcgtccggggccatcacttcgaactcctggcggggctcagccatgctggttccgctgacacctgtccgtcgaca

SEQ ID NO: 1734 - RNA, 100 nt, synthetic construct
  source 1..100: mol_type = other RNA
tccaggcccccataacgtacgaagcagcgtccggggccatcacttcgaactcctggcggggctcagccatgctggttccgctgacacctgatagtcgaca

SEQ ID NO: 1735 - RNA, 100 nt, synthetic construct
  source 1..100: mol_type = other RNA
tcctgtcccagtacccgtttttcccagaattaccttccatcacttcgaactcctggcggggctcagccatgctggttccgtaaccacctgcgtgtcgaca

SEQ ID NO: 1736 - RNA, 100 nt, synthetic construct
  source 1..100: mol_type = other RNA
tcctgtcccagtacccgtttttcccagaattaccttccatcacttcgaactcctggcggggctcagccatgctggttccgtaaccacctgatagtcgaca

SEQ ID NO: 1737 - RNA, 100 nt, synthetic construct
  source 1..100: mol_type = other RNA
tcctgtccggaaacccggtggtcccaaatctctcttccatcacttcgaactcctggcggggctcagccatgctggttccgccgccacctgctcgtcgaca

SEQ ID NO: 1738 - RNA, 100 nt, synthetic construct
  source 1..100: mol_type = other RNA
tcctgtccggaaacccggtggtcccaaatctctcttccatcacttcgaactcctggcggggctcagccatgctggttccgccgccacctgatagtcgaca

SEQ ID NO: 1739 - RNA, 100 nt, synthetic construct
  source 1..100: mol_type = other RNA
tcctgtcgagcaaccccatcgtccccaacaaatcttccatcacttcgaactcctggcggggctcagccatgctggttctcataacacctgcctgtcgaca

SEQ ID NO: 1740 - RNA, 100 nt, synthetic construct
  source 1..100: mol_type = other RNA
tcctgtcgagcaaccccatcgtccccaacaaatcttccatcacttcgaactcctggcggggctcagccatgctggttctcataacacctgatagtcgaca

SEQ ID NO: 1741 - RNA, 100 nt, synthetic construct
  source 1..100: mol_type = other RNA
tcctgtccgagaacccggcagtcccaaactgatctcagatcactcatccgtcctggcggggctcagccacgctggttcattacagacctgatagtcgaca

SEQ ID NO: 1742 - RNA, 100 nt, synthetic construct
  source 1..100: mol_type = other RNA
tcctgtcaagcaaccccttcgtccctaagtgatcatacatcacgtattcctcctggcggggctcagccacgctggttcatcacgaacctgactatcgaca

SEQ ID NO: 1743 - RNA, 100 nt, synthetic construct
  source 1..100: mol_type = other RNA
tcctgtcaagcaaccccttcgtccctaagtgatcatacatcacgtattcctcctggcggggctcagccacgctggttcatcacgaacctgatagtcgaca

SEQ ID NO: 1744 - RNA, 100 nt, synthetic construct
  source 1..100: mol_type = other RNA
tcctgtagaccaaccatcacgtccgcccgtgatagaccatcagactttactcctggcggggctcagccacgctggttcacgctaaacctgacactcgaca

SEQ ID NO: 1745 - RNA, 100 nt, synthetic construct
  source 1..100: mol_type = other RNA
tcctgtagaccaaccatcacgtccgcccgtgatagaccatcagactttactcctggcggggctcagccacgctggttcacgctaaacctgatagtcgaca

SEQ ID NO: 1746 - RNA, 100 nt, synthetic construct
  source 1..100: mol_type = other RNA
tcctgaaacccaacggttacgtcggtgcgtgagactccatctgtcccaactcctggcggggctcagccacgctggttcactccagacctgaacctcgaca

SEQ ID NO: 1747 - RNA, 100 nt, synthetic construct
  source 1..100: mol_type = other RNA
tcctgaaacccaacggttacgtcggtgcgtgagactccatctgtcccaactcctggcggggctcagccacgctggttcactccagacctgatagtcgaca

SEQ ID NO: 1748 - RNA, 100 nt, synthetic construct
  source 1..100: mol_type = other RNA
tcctccgccccaaaaggtacgtaaaagcgtgtggttccatgtgacggaactcctggcggggctcagccacgctggttcacttaagacctgaaaatcgaca

SEQ ID NO: 1749 - RNA, 100 nt, synthetic construct
  source 1..100: mol_type = other RNA
tcctccgccccaaaaggtacgtaaaagcgtgtggttccatgtgacggaactcctggcggggctcagccacgctggttcacttaagacctgatagtcgaca

SEQ ID NO: 1750 - RNA, 100 nt, synthetic construct
  source 1..100: mol_type = other RNA
tccgaacccccacggcgtacgcggcagcgtaaccttccaggcaagcgaactcctggcggggctcagccacgctggttcatccaggacctgagcctcgaca

SEQ ID NO: 1751 - RNA, 100 nt, synthetic construct
  source 1..100: mol_type = other RNA
tccgaacccccacggcgtacgcggcagcgtaaccttccaggcaagcgaactcctggcggggctcagccacgctggttcatccaggacctgatagtcgaca

SEQ ID NO: 1752 - RNA, 100 nt, synthetic construct
  source 1..100: mol_type = other RNA
tcggttcccccttgccgtacccgccagcgctctcttccttaaggtcgaactcctggcggggctcagccacgctggttcactccggacctgaacttcgaca

SEQ ID NO: 1753 - RNA, 100 nt, synthetic construct
  source 1..100: mol_type = other RNA
tcggttcccccttgccgtacccgccagcgctctcttccttaaggtcgaactcctggcggggctcagccacgctggttcactccggacctgatagtcgaca

SEQ ID NO: 1754 - RNA, 100 nt, synthetic construct
  source 1..100: mol_type = other RNA
tcctgtcccgacacccgtcaatcccagacagatcttgagactcttcgaactcctggcggggctcagccacgctggttcacttcaaacctgagtctcgaca

SEQ ID NO: 1755 - RNA, 100 nt, synthetic construct
  source 1..100: mol_type = other RNA
tcctgtcccgacacccgtcaatcccagacagatcttgagactcttcgaactcctggcggggctcagccacgctggttcacttcaaacctgatagtcgaca

SEQ ID NO: 1756 - RNA, 100 nt, synthetic construct
  source 1..100: mol_type = other RNA
tcctgtccaggaacccgccggtcccacactgatctggagggacttcgaactcctggcggggctcagccacgctggttcatctacgacctgaacatcgaca

SEQ ID NO: 1757 - RNA, 100 nt, synthetic construct
  source 1..100: mol_type = other RNA
tcctgtccaggaacccgccggtcccacactgatctggagggacttcgaactcctggcggggctcagccacgctggttcatctacgacctgatagtcgaca

SEQ ID NO: 1758 - RNA, 100 nt, synthetic construct
  source 1..100: mol_type = other RNA
tcctgtcacacaaccccttcgtcccctagtgatccggttacacttcgaactcctggcggggctcagccacgctggttcattagagacctgaaaatcgaca

SEQ ID NO: 1759 - RNA, 100 nt, synthetic construct
  source 1..100: mol_type = other RNA
tcctgtcacacaaccccttcgtcccctagtgatccggttacacttcgaactcctggcggggctcagccacgctggttcattagagacctgatagtcgaca

SEQ ID NO: 1760 - RNA, 100 nt, synthetic construct
  source 1..100: mol_type = other RNA
tcctgtacaccaaccgtgacgtccgttcgtgatacaggctcacttcgaactcctggcggggctcagccacgctggttcattagaaacctgactttcgaca

SEQ ID NO: 1761 - RNA, 100 nt, synthetic construct
  source 1..100: mol_type = other RNA
tcctgtacaccaaccgtgacgtccgttcgtgatacaggctcacttcgaactcctggcggggctcagccacgctggttcattagaaacctgatagtcgaca

SEQ ID NO: 1762 - RNA, 100 nt, synthetic construct
  source 1..100: mol_type = other RNA
tcctgaaacccaacaaatacgtcgatgcgtgaataggaatcacttcgaactcctggcggggctcagccacgctggttcatttgcaacctgacattcgaca

SEQ ID NO: 1763 - RNA, 100 nt, synthetic construct
  source 1..100: mol_type = other RNA
tcctgaaacccaacaaatacgtcgatgcgtgaataggaatcacttcgaactcctggcggggctcagccacgctggttcatttgcaacctgatagtcgaca

SEQ ID NO: 1764 - RNA, 100 nt, synthetic construct
  source 1..100: mol_type = other RNA
tccttggccccaaaaggtacgtagaagcgtgtgacggcatcacttcgaactcctggcggggctcagccacgctggttcacctgggacctgagcttcgaca

SEQ ID NO: 1765 - RNA, 100 nt, synthetic construct
  source 1..100: mol_type = other RNA
tccttggccccaaaaggtacgtagaagcgtgtgacggcatcacttcgaactcctggcggggctcagccacgctggttcacctgggacctgatagtcgaca

SEQ ID NO: 1766 - RNA, 100 nt, synthetic construct
  source 1..100: mol_type = other RNA
tcccaacccccatggcgtacgacacagcgttgccagccatcacttcgaactcctggcggggctcagccacgctggttcattagcaacctgagcctcgaca

SEQ ID NO: 1767 - RNA, 100 nt, synthetic construct
  source 1..100: mol_type = other RNA
tcccaacccccatggcgtacgacacagcgttgccagccatcacttcgaactcctggcggggctcagccacgctggttcattagcaacctgatagtcgaca

SEQ ID NO: 1768 - RNA, 100 nt, synthetic construct
  source 1..100: mol_type = other RNA
tcctgtcccaatacccgtcattcccaggacacccttccatcacttcgaactcctggcggggctcagccacgctggttcatcgccaacctgagtttcgaca

SEQ ID NO: 1769 - RNA, 100 nt, synthetic construct
  source 1..100: mol_type = other RNA
tcctgtcccaatacccgtcattcccaggacacccttccatcacttcgaactcctggcggggctcagccacgctggttcatcgccaacctgatagtcgaca

SEQ ID NO: 1770 - RNA, 100 nt, synthetic construct
  source 1..100: mol_type = other RNA
tcctgtccacaaacccgctggtcccatcagcttcttccatcacttcgaactcctggcggggctcagccacgctggttcaccctgaacctgaacttcgaca

SEQ ID NO: 1771 - RNA, 100 nt, synthetic construct
  source 1..100: mol_type = other RNA
tcctgtccacaaacccgctggtcccatcagcttcttccatcacttcgaactcctggcggggctcagccacgctggttcaccctgaacctgatagtcgaca

SEQ ID NO: 1772 - RNA, 100 nt, synthetic construct
  source 1..100: mol_type = other RNA
tcctgtcgggcaaccccgccgtccctctcttatcttccatcacttcgaactcctggcggggctcagccacgctggttcactactaacctgaacctcgaca

SEQ ID NO: 1773 - RNA, 100 nt, synthetic construct
  source 1..100: mol_type = other RNA
tcctgtcgggcaaccccgccgtccctctcttatcttccatcacttcgaactcctggcggggctcagccacgctggttcactactaacctgatagtcgaca

SEQ ID NO: 1774 - RNA, 100 nt, synthetic construct
  source 1..100: mol_type = other RNA
tcctgtccagaaacccggtagtcccatactgatctcagatcactcacttgtcctggcggggctcagccacgctggttcaaccgaatcctgatttccgaca

SEQ ID NO: 1775 - RNA, 100 nt, synthetic construct
  source 1..100: mol_type = other RNA
tcctgtccagaaacccggtagtcccatactgatctcagatcactcacttgtcctggcggggctcagccacgctggttcaaccgaatcctgatagtcgaca

SEQ ID NO: 1776 - RNA, 100 nt, synthetic construct
  source 1..100: mol_type = other RNA
tcctgtcgggcaaccctatcgtccccaagtgatcgagcatcacagtatcctcctggcggggctcagccacgctggttcaattacgtcctgatttgcgaca

SEQ ID NO: 1777 - RNA, 100 nt, synthetic construct
  source 1..100: mol_type = other RNA
tcctgtcgggcaaccctatcgtccccaagtgatcgagcatcacagtatcctcctggcggggctcagccacgctggttcaattacgtcctgatagtcgaca

SEQ ID NO: 1778 - RNA, 100 nt, synthetic construct
  source 1..100: mol_type = other RNA
tcctgtggaccaaccgaaacgtccaaccgtgatatgccatcagcggttactcctggcggggctcagccacgctggttcaaccgccccctgatagtcgaca

SEQ ID NO: 1779 - RNA, 100 nt, synthetic construct
  source 1..100: mol_type = other RNA
tcctgcggcccaacggctacgtcagtgcgtgacgatccatcttccacaactcctggcggggctcagccacgctggttcaactaattcctgatctccgaca

SEQ ID NO: 1780 - RNA, 100 nt, synthetic construct
  source 1..100: mol_type = other RNA
tcctgcggcccaacggctacgtcagtgcgtgacgatccatcttccacaactcctggcggggctcagccacgctggttcaactaattcctgatagtcgaca

SEQ ID NO: 1781 - RNA, 100 nt, synthetic construct
  source 1..100: mol_type = other RNA
tcctacgccccaaggggtacgtggaagcgtgcagttccatagatcagaactcctggcggggctcagccacgctggttcaataccgtcctgatcaccgaca

SEQ ID NO: 1782 - RNA, 100 nt, synthetic construct
  source 1..100: mol_type = other RNA
tcctacgccccaaggggtacgtggaagcgtgcagttccatagatcagaactcctggcggggctcagccacgctggttcaataccgtcctgatagtcgaca

SEQ ID NO: 1783 - RNA, 100 nt, synthetic construct
  source 1..100: mol_type = other RNA
tccaagcccccatggcgtacgaagcagcgttaccttccaggtgagcgaactcctggcggggctcagccacgctggttcaattccatcctgattcacgaca

SEQ ID NO: 1784 - RNA, 100 nt, synthetic construct
  source 1..100: mol_type = other RNA
tccaagcccccatggcgtacgaagcagcgttaccttccaggtgagcgaactcctggcggggctcagccacgctggttcaattccatcctgatagtcgaca

SEQ ID NO: 1785 - RNA, 100 nt, synthetic construct
  source 1..100: mol_type = other RNA
tcacctccccctaaccgtacaaaccagcgggttcttcctacccctcgaactcctggcggggctcagccacgctggttcaatgcgatcctgatccgcgaca

SEQ ID NO: 1786 - RNA, 100 nt, synthetic construct
  source 1..100: mol_type = other RNA
tcacctccccctaaccgtacaaaccagcgggttcttcctacccctcgaactcctggcggggctcagccacgctggttcaatgcgatcctgatagtcgaca

SEQ ID NO: 1787 - RNA, 100 nt, synthetic construct
  source 1..100: mol_type = other RNA
tcctgtcccagcacccgtttatcccagaccgatcttaatgttcttcgaactcctggcggggctcagccacgctggttcaactaaatcctgattcgcgaca

SEQ ID NO: 1788 - RNA, 100 nt, synthetic construct
  source 1..100: mol_type = other RNA
tcctgtcccagcacccgtttatcccagaccgatcttaatgttcttcgaactcctggcggggctcagccacgctggttcaactaaatcctgatagtcgaca

SEQ ID NO: 1789 - RNA, 100 nt, synthetic construct
  source 1..100: mol_type = other RNA
tcctgtccaaaaacccgctggtcccattttgatctgaagcaacttcgaactcctggcggggctcagccacgctggttcaatacacccctgattaccgaca

SEQ ID NO: 1790 - RNA, 100 nt, synthetic construct
  source 1..100: mol_type = other RNA
tcctgtccaaaaacccgctggtcccattttgatctgaagcaacttcgaactcctggcggggctcagccacgctggttcaatacacccctgatagtcgaca

SEQ ID NO: 1791 - RNA, 100 nt, synthetic construct
  source 1..100: mol_type = other RNA
tcctgtcaggcaacccagccgtcccctagtgatcgaactgcacttcgaactcctggcggggctcagccacgctggttcaaccgaatcctgatccgcgaca

SEQ ID NO: 1792 - RNA, 100 nt, synthetic construct
  source 1..100: mol_type = other RNA
tcctgtcaggcaacccagccgtcccctagtgatcgaactgcacttcgaactcctggcggggctcagccacgctggttcaaccgaatcctgatagtcgaca

SEQ ID NO: 1793 - RNA, 100 nt, synthetic construct
  source 1..100: mol_type = other RNA
tcctgtaggccaaccgagacgtccatacgtgatgctatttcacttcgaactcctggcggggctcagccacgctggttcaacatccccctgatcaccgaca

SEQ ID NO: 1794 - RNA, 100 nt, synthetic construct
  source 1..100: mol_type = other RNA
tcctgtaggccaaccgagacgtccatacgtgatgctatttcacttcgaactcctggcggggctcagccacgctggttcaacatccccctgatagtcgaca

SEQ ID NO: 1795 - RNA, 100 nt, synthetic construct
  source 1..100: mol_type = other RNA
tcctgaagcccaacggttacgtcggtgcgtgacaggaaatcacttcgaactcctggcggggctcagccacgctggttcaaccgggtcctgatccacgaca

SEQ ID NO: 1796 - RNA, 100 nt, synthetic construct
  source 1..100: mol_type = other RNA
tcctgaagcccaacggttacgtcggtgcgtgacaggaaatcacttcgaactcctggcggggctcagccacgctggttcaaccgggtcctgatagtcgaca

SEQ ID NO: 1797 - RNA, 100 nt, synthetic construct
  source 1..100: mol_type = other RNA
tcctcggccccaaggggtacgtgaaagcgtgtggccacatcacttcgaactcctggcggggctcagccacgctggttcaatagactcctgattaacgaca

SEQ ID NO: 1798 - RNA, 100 nt, synthetic construct
  source 1..100: mol_type = other RNA
tcctcggccccaaggggtacgtgaaagcgtgtggccacatcacttcgaactcctggcggggctcagccacgctggttcaatagactcctgatagtcgaca

SEQ ID NO: 1799 - RNA, 100 nt, synthetic construct
  source 1..100: mol_type = other RNA
tccgcgcccccacaacgtacggtacagcgtcgcgaaccatcacttcgaactcctggcggggctcagccacgctggttcaacctcttcctgatcaacgaca

SEQ ID NO: 1800 - RNA, 100 nt, synthetic construct
  source 1..100: mol_type = other RNA
tcgaatccccctaaccgtactagccagcggcaaagtccatcacttcgaactcctggcggggctcagccacgctggttcaattagatcctgatctccgaca

SEQ ID NO: 1801 - RNA, 100 nt, synthetic construct
  source 1..100: mol_type = other RNA
tcgaatccccctaaccgtactagccagcggcaaagtccatcacttcgaactcctggcggggctcagccacgctggttcaattagatcctgatagtcgaca

SEQ ID NO: 1802 - RNA, 100 nt, synthetic construct
  source 1..100: mol_type = other RNA
tcctgtcccggtacccgtttctcccagatcagccttccatcacttcgaactcctggcggggctcagccacgctggttcaacctccccctgatctacgaca

SEQ ID NO: 1803 - RNA, 100 nt, synthetic construct
  source 1..100: mol_type = other RNA
tcctgtcccggtacccgtttctcccagatcagccttccatcacttcgaactcctggcggggctcagccacgctggttcaacctccccctgatagtcgaca

SEQ ID NO: 1804 - RNA, 100 nt, synthetic construct
  source 1..100: mol_type = other RNA
tcctgtccaagaacccggtggtcccacacatctcttccatcacttcgaactcctggcggggctcagccacgctggttcaatctagtcctgatctccgaca

SEQ ID NO: 1805 - RNA, 100 nt, synthetic construct
  source 1..100: mol_type = other RNA
tcctgtccaagaacccggtggtcccacacatctcttccatcacttcgaactcctggcggggctcagccacgctggttcaatctagtcctgatagtcgaca

SEQ ID NO: 1806 - RNA, 100 nt, synthetic construct
  source 1..100: mol_type = other RNA
tcctgtcaggcaacccatccgtccccatttcatcttccatcacttcgaactcctggcggggctcagccacgctggttcaatgacatcctgatcaacgaca

SEQ ID NO: 1807 - RNA, 100 nt, synthetic construct
  source 1..100: mol_type = other RNA
tcctgtcaggcaacccatccgtccccatttcatcttccatcacttcgaactcctggcggggctcagccacgctggttcaatgacatcctgatagtcgaca

SEQ ID NO: 1808 - RNA, 100 nt, synthetic construct
  source 1..100: mol_type = other RNA
tcctgtccgggaacccgctggtcccataatgatctgggatcactgctgtatcctggcggggctcagccacgctggttcaaaactagactgataaaggaca

SEQ ID NO: 1809 - RNA, 100 nt, synthetic construct
  source 1..100: mol_type = other RNA
tcctgtccgggaacccgctggtcccataatgatctgggatcactgctgtatcctggcggggctcagccacgctggttcaaaactagactgatagtcgaca

SEQ ID NO: 1810 - RNA, 100 nt, synthetic construct
  source 1..100: mol_type = other RNA
tcctgtgggccaaccgagacgtccatccgtgatggcccatcaaactatactcctggcggggctcagccacgctggttcaaataagtgctgataccggaca

SEQ ID NO: 1811 - RNA, 100 nt, synthetic construct
  source 1..100: mol_type = other RNA
tcctgtgggccaaccgagacgtccatccgtgatggcccatcaaactatactcctggcggggctcagccacgctggttcaaataagtgctgatagtcgaca

SEQ ID NO: 1812 - RNA, 100 nt, synthetic construct
  source 1..100: mol_type = other RNA
tcctgaaacccaacggatacgtcaacgcgtgaagctccatcccctataactcctggcggggctcagccacgctggttcaaaaaggtgctgataagggaca

SEQ ID NO: 1813 - RNA, 100 nt, synthetic construct
  source 1..100: mol_type = other RNA
tcctgaaacccaacggatacgtcaacgcgtgaagctccatcccctataactcctggcggggctcagccacgctggttcaaaaaggtgctgatagtcgaca

SEQ ID NO: 1814 - RNA, 100 nt, synthetic construct
  source 1..100: mol_type = other RNA
tcctttaccccaaggggtacgtagaagcgtgccgttccatgtagcggaactcctggcggggctcagccacgctggttcaaaacaaaactgatatgggaca

SEQ ID NO: 1815 - RNA, 100 nt, synthetic construct
  source 1..100: mol_type = other RNA
tcctttaccccaaggggtacgtagaagcgtgccgttccatgtagcggaactcctggcggggctcagccacgctggttcaaaacaaaactgatagtcgaca

SEQ ID NO: 1816 - RNA, 100 nt, synthetic construct
  source 1..100: mol_type = other RNA
tccacgcccccatgacgtacgacacagcgtttgcttccaaaaaaccgaactcctggcggggctcagccacgctggttcaaaactgtactgataccggaca

SEQ ID NO: 1817 - RNA, 100 nt, synthetic construct
  source 1..100: mol_type = other RNA
tccacgcccccatgacgtacgacacagcgtttgcttccaaaaaaccgaactcctggcggggctcagccacgctggttcaaaactgtactgatagtcgaca

SEQ ID NO: 1818 - RNA, 100 nt, synthetic construct
  source 1..100: mol_type = other RNA
tcctgtcccgacacccgtcaatcccagaaagatcttggtaaccttcgaactcctggcggggctcagccacgctggttcaaatgggtgctgatattagaca

SEQ ID NO: 1819 - RNA, 100 nt, synthetic construct
  source 1..100: mol_type = other RNA
tcctgtcccgacacccgtcaatcccagaaagatcttggtaaccttcgaactcctggcggggctcagccacgctggttcaaatgggtgctgatagtcgaca

SEQ ID NO: 1820 - RNA, 100 nt, synthetic construct
  source 1..100: mol_type = other RNA
tcctgtcaaacaacccatccgtcccccggtgatcacattgcacttcgaactcctggcggggctcagccacgctggttcaaataagtgctgataacagaca

SEQ ID NO: 1821 - RNA, 100 nt, synthetic construct
  source 1..100: mol_type = other RNA
tcctgtcaaacaacccatccgtcccccggtgatcacattgcacttcgaactcctggcggggctcagccacgctggttcaaataagtgctgatagtcgaca

SEQ ID NO: 1822 - RNA, 100 nt, synthetic construct
  source 1..100: mol_type = other RNA
tcctgtgagccaaccgacacgtccgctcgtgatgacggttcacttcgaactcctggcggggctcagccacgctggttcaaataaccgctgatataggaca

SEQ ID NO: 1823 - RNA, 100 nt, synthetic construct
  source 1..100: mol_type = other RNA
tcctgtgagccaaccgacacgtccgctcgtgatgacggttcacttcgaactcctggcggggctcagccacgctggttcaaataaccgctgatagtcgaca

SEQ ID NO: 1824 - RNA, 100 nt, synthetic construct
  source 1..100: mol_type = other RNA
tcctggagcccaacggttacgtcaatgcgtgacgtagaatcacttcgaactcctggcggggctcagccacgctggttcaaatggagactgatatgagaca

SEQ ID NO: 1825 - RNA, 100 nt, synthetic construct
  source 1..100: mol_type = other RNA
tcctggagcccaacggttacgtcaatgcgtgacgtagaatcacttcgaactcctggcggggctcagccacgctggttcaaatggagactgatagtcgaca

SEQ ID NO: 1826 - RNA, 100 nt, synthetic construct
  source 1..100: mol_type = other RNA
tccttggccccaagaggtacgtgaaagcgtgccgtggcatcacttcgaactcctggcggggctcagccacgctggttcaaacaggtgctgataaaggaca

SEQ ID NO: 1827 - RNA, 100 nt, synthetic construct
  source 1..100: mol_type = other RNA
tccttggccccaagaggtacgtgaaagcgtgccgtggcatcacttcgaactcctggcggggctcagccacgctggttcaaacaggtgctgatagtcgaca

SEQ ID NO: 1828 - RNA, 100 nt, synthetic construct
  source 1..100: mol_type = other RNA
tccgaacccccacaacgtacgatacagcgttccacaccatcacttcgaactcctggcggggctcagccacgctggttcaaaccgggactgatactagaca

SEQ ID NO: 1829 - RNA, 100 nt, synthetic construct
  source 1..100: mol_type = other RNA
tccgaacccccacaacgtacgatacagcgttccacaccatcacttcgaactcctggcggggctcagccacgctggttcaaaccgggactgatagtcgaca

SEQ ID NO: 1830 - RNA, 100 nt, synthetic construct
  source 1..100: mol_type = other RNA
tcctgtcccagtacccgttaatcccaggcaacccttccatcacttcgaactcctggcggggctcagccacgctggttcaaatacccgctgataacagaca

SEQ ID NO: 1831 - RNA, 100 nt, synthetic construct
  source 1..100: mol_type = other RNA
tcctgtcccagtacccgttaatcccaggcaacccttccatcacttcgaactcctggcggggctcagccacgctggttcaaatacccgctgatagtcgaca

SEQ ID NO: 1832 - RNA, 100 nt, synthetic construct
  source 1..100: mol_type = other RNA
tcctgtccaagaacccggaagtcccacaactttcttccatcacttcgaactcctggcggggctcagccacgctggttcaaactaccactgatacgggaca

SEQ ID NO: 1833 - RNA, 100 nt, synthetic construct
  source 1..100: mol_type = other RNA
tcctgtccaagaacccggaagtcccacaactttcttccatcacttcgaactcctggcggggctcagccacgctggttcaaactaccactgatagtcgaca

SEQ ID NO: 1834 - RNA, 100 nt, synthetic construct
  source 1..100: mol_type = other RNA
tcctgtccaggaacccggcagtcccaatctgatctgaaatcactagtaaatcctggcggggctcagccacgctggttcaaagagtctatgatagggtaca

SEQ ID NO: 1835 - RNA, 100 nt, synthetic construct
  source 1..100: mol_type = other RNA
tcctgtccaggaacccggcagtcccaatctgatctgaaatcactagtaaatcctggcggggctcagccacgctggttcaaagagtctatgatagtcgaca

SEQ ID NO: 1836 - RNA, 100 nt, synthetic construct
  source 1..100: mol_type = other RNA
tcctgtcacacaaccccttcgtccctcagtgatcacacatcacggatgtctcctggcggggctcagccacgctggttcaaaggcttggtgatagggtaca

SEQ ID NO: 1837 - RNA, 100 nt, synthetic construct
  source 1..100: mol_type = other RNA
tcctgtcacacaaccccttcgtccctcagtgatcacacatcacggatgtctcctggcggggctcagccacgctggttcaaaggcttggtgatagtcgaca

SEQ ID NO: 1838 - RNA, 100 nt, synthetic construct
  source 1..100: mol_type = other RNA
tcctgtgggccaaccgtgacgtccgtccgtgataggccatcaagggttactcctggcggggctcagccacgctggttcaaagcaggaatgatagggtaca

SEQ ID NO: 1839 - RNA, 100 nt, synthetic construct
  source 1..100: mol_type = other RNA
tcctgtgggccaaccgtgacgtccgtccgtgataggccatcaagggttactcctggcggggctcagccacgctggttcaaagcaggaatgatagtcgaca

SEQ ID NO: 1840 - RNA, 100 nt, synthetic construct
  source 1..100: mol_type = other RNA
tcctgaagcccaacgaatacgtcactgcgtgacgctccatctgggataactcctggcggggctcagccacgctggttcaaagcggtgatgatagggtaca

SEQ ID NO: 1841 - RNA, 100 nt, synthetic construct
  source 1..100: mol_type = other RNA
tcctgaagcccaacgaatacgtcactgcgtgacgctccatctgggataactcctggcggggctcagccacgctggttcaaagcggtgatgatagtcgaca

SEQ ID NO: 1842 - RNA, 100 nt, synthetic construct
  source 1..100: mol_type = other RNA
tcctccgccccaaagagtacgtggaagcgtgcgattccatgttcaggaactcctggcggggctcagccacgctggttcaaaggagtgatgatagggtaca

SEQ ID NO: 1843 - RNA, 100 nt, synthetic construct
  source 1..100: mol_type = other RNA
tcctccgccccaaagagtacgtggaagcgtgcgattccatgttcaggaactcctggcggggctcagccacgctggttcaaaggagtgatgatagtcgaca

SEQ ID NO: 1844 - RNA, 100 nt, synthetic construct
  source 1..100: mol_type = other RNA
tccaggcccccatggcgtacgcggcagcgtacgcttccacttgtacgaactcctggcggggctcagccacgctggttcaaagcatgaatgataggaaaca

SEQ ID NO: 1845 - RNA, 100 nt, synthetic construct
  source 1..100: mol_type = other RNA
tccaggcccccatggcgtacgcggcagcgtacgcttccacttgtacgaactcctggcggggctcagccacgctggttcaaagcatgaatgatagtcgaca

SEQ ID NO: 1846 - RNA, 100 nt, synthetic construct
  source 1..100: mol_type = other RNA
tcagttccccccaaccgtactaaccagcggtctcttcccaagggtcgaactcctggcggggctcagccacgctggttcaaagggttagtgataggataca

SEQ ID NO: 1847 - RNA, 100 nt, synthetic construct
  source 1..100: mol_type = other RNA
tcagttccccccaaccgtactaaccagcggtctcttcccaagggtcgaactcctggcggggctcagccacgctggttcaaagggttagtgatagtcgaca

SEQ ID NO: 1848 - RNA, 100 nt, synthetic construct
  source 1..100: mol_type = other RNA
tcctgtcccagcacccgtctctcccaggacgatcttgacgatcttcgaactcctggcggggctcagccacgctggttcaaagccaagatgatagggtaca

SEQ ID NO: 1849 - RNA, 100 nt, synthetic construct
  source 1..100: mol_type = other RNA
tcctgtcccagcacccgtctctcccaggacgatcttgacgatcttcgaactcctggcggggctcagccacgctggttcaaagccaagatgatagtcgaca

SEQ ID NO: 1850 - RNA, 100 nt, synthetic construct
  source 1..100: mol_type = other RNA
tcctgtccggaaacccgaaagtcccaaaatgatctcaagggacttcgaactcctggcggggctcagccacgctggttcaaagcgatggtgatagggtaca

SEQ ID NO: 1851 - RNA, 100 nt, synthetic construct
  source 1..100: mol_type = other RNA
tcctgtccggaaacccgaaagtcccaaaatgatctcaagggacttcgaactcctggcggggctcagccacgctggttcaaagcgatggtgatagtcgaca

SEQ ID NO: 1852 - RNA, 100 nt, synthetic construct
  source 1..100: mol_type = other RNA
tcctgtggaccaaccatcacgtccaaacgtgatgccttttcacttcgaactcctggcggggctcagccacgctggttcaaagctaaaatgatagggtaca

SEQ ID NO: 1853 - RNA, 100 nt, synthetic construct
  source 1..100: mol_type = other RNA
tcctgtggaccaaccatcacgtccaaacgtgatgccttttcacttcgaactcctggcggggctcagccacgctggttcaaagctaaaatgatagtcgaca

SEQ ID NO: 1854 - RNA, 100 nt, synthetic construct
  source 1..100: mol_type = other RNA
tcctgcggcccaacaactacgtcggcgcgtgaccacggatcacttcgaactcctggcggggctcagccacgctggttcaaaggctgggtgatagggtaca

SEQ ID NO: 1855 - RNA, 100 nt, synthetic construct
  source 1..100: mol_type = other RNA
tcctgcggcccaacaactacgtcggcgcgtgaccacggatcacttcgaactcctggcggggctcagccacgctggttcaaaggctgggtgatagtcgaca

SEQ ID NO: 1856 - RNA, 100 nt, synthetic construct
  source 1..100: mol_type = other RNA
tcctcagccccaaggggtacgtaaaagcgtgcccccacatcacttcgaactcctggcggggctcagccacgctggttcaaagatgcaatgatagggtaca

SEQ ID NO: 1857 - RNA, 100 nt, synthetic construct
  source 1..100: mol_type = other RNA
tcctcagccccaaggggtacgtaaaagcgtgcccccacatcacttcgaactcctggcggggctcagccacgctggttcaaagatgcaatgatagtcgaca

SEQ ID NO: 1858 - RNA, 100 nt, synthetic construct
  source 1..100: mol_type = other RNA
tccgcgcccccatagcgtacgcaacagcgtctgaccccatcacttcgaactcctggcggggctcagccacgctggttcaaagggtggatgatagtcgaca

SEQ ID NO: 1859 - RNA, 100 nt, synthetic construct
  source 1..100: mol_type = other RNA
tcatctcccccctaccgtaccggccagcgcataggtccatcacttcgaactcctggcggggctcagccacgctggttcaaaggaaagatgatagggtaca

SEQ ID NO: 1860 - RNA, 100 nt, synthetic construct
  source 1..100: mol_type = other RNA
tcatctcccccctaccgtaccggccagcgcataggtccatcacttcgaactcctggcggggctcagccacgctggttcaaaggaaagatgatagtcgaca

SEQ ID NO: 1861 - RNA, 100 nt, synthetic construct
  source 1..100: mol_type = other RNA
tcctgtcccaacacccgtcattcccagattacgcttccatcacttcgaactcctggcggggctcagccacgctggttcaaagcaatagtgatagggtaca

SEQ ID NO: 1862 - RNA, 100 nt, synthetic construct
  source 1..100: mol_type = other RNA
tcctgtccgagaacccggcagtcccactctattcttccatcacttcgaactcctggcggggctcagccacgctggttcaaagctgtggtgatagggtaca

SEQ ID NO: 1863 - RNA, 100 nt, synthetic construct
  source 1..100: mol_type = other RNA
tcctgtccgagaacccggcagtcccactctattcttccatcacttcgaactcctggcggggctcagccacgctggttcaaagctgtggtgatagtcgaca

SEQ ID NO: 1864 - RNA, 100 nt, synthetic construct
  source 1..100: mol_type = other RNA
tcaattccccctaaccgtacctaccagcgccttcttcctagttctcgaactcctggcggggctcagccacgctaactataagttctaatgataggataca

SEQ ID NO: 1865 - RNA, 100 nt, synthetic construct
  source 1..100: mol_type = other RNA
tcctgtccggaaacccggcggtcccaatttgatctaaacgaacttcgaactcctggcggggctcagccacgcttaccctaagttcttatgataggtaaca

SEQ ID NO: 1866 - RNA, 100 nt, synthetic construct
  source 1..100: mol_type = other RNA
tcctgtgggccaaccaagacgtccatacgtgatgcgagttcacttcgaactcctggcggggctcagccacgctaagcccaagttccggtgatagggtaca

SEQ ID NO: 1867 - RNA, 100 nt, synthetic construct
  source 1..100: mol_type = other RNA
tcctacaccccaaggggtacgtacaagcgtgcgtgcgcatcacttcgaactcctggcggggctcagccacgcttactataagttctgatgatagggtaca

SEQ ID NO: 1868 - RNA, 100 nt, synthetic construct
  source 1..100: mol_type = other RNA
tcctgtccgaaaacccggtggtcccaatctcttcttccatcacttcgaactcctggcggggctcagccacgctagctacaagttctgatgatagggtaca

SEQ ID NO: 1869 - RNA, 100 nt, synthetic construct
  source 1..100: mol_type = other RNA
tcctgtcgggcaaccccttcgtccccaagtgatcggacatcacgaaaatctcctggcggggctcagccacgctgttgattagttcagaagatagtcgaca

SEQ ID NO: 1870 - RNA, 100 nt, synthetic construct
  source 1..100: mol_type = other RNA
tcctgtcgggcaaccccttcgtccccaagtgatcggacatcacgaaaatctcctggcggggctcagccacgctgttgattagttcacctgatagtcgaca

SEQ ID NO: 1871 - RNA, 100 nt, synthetic construct
  source 1..100: mol_type = other RNA
tcctgtggaccaaccatcacgtccgcccgtgatatgccatcaggagctactcctggcggggctcagccacgctgtaatatagttcagaggatagtcgaca

SEQ ID NO: 1872 - RNA, 100 nt, synthetic construct
  source 1..100: mol_type = other RNA
tcctgtggaccaaccatcacgtccgcccgtgatatgccatcaggagctactcctggcggggctcagccacgctgtaatatagttcacctgatagtcgaca

SEQ ID NO: 1873 - RNA, 100 nt, synthetic construct
  source 1..100: mol_type = other RNA
tcctggcacccaacgaatacgtcgatgcgtgagactccatctgggataactcctggcggggctcagccacgctgttaattagttcaaaagatagtcgaca

SEQ ID NO: 1874 - RNA, 100 nt, synthetic construct
  source 1..100: mol_type = other RNA
tcctggcacccaacgaatacgtcgatgcgtgagactccatctgggataactcctggcggggctcagccacgctgttaattagttcacctgatagtcgaca

SEQ ID NO: 1875 - RNA, 100 nt, synthetic construct
  source 1..100: mol_type = other RNA
tcctagaccccaaacagtacgtggaagcgtgcaattccatgtttgggaactcctggcggggctcagccacgctgacctgtagttcaggcgatagtcgaca

SEQ ID NO: 1876 - RNA, 100 nt, synthetic construct
  source 1..100: mol_type = other RNA
tcccaacccccacggcgtacggggcagcgtctgcttccacgtgcacgaactcctggcggggctcagccacgctgtataccagttcagacgatagtcgaca

SEQ ID NO: 1877 - RNA, 100 nt, synthetic construct
  source 1..100: mol_type = other RNA
tcccaacccccacggcgtacggggcagcgtctgcttccacgtgcacgaactcctggcggggctcagccacgctgtataccagttcacctgatagtcgaca

SEQ ID NO: 1878 - RNA, 100 nt, synthetic construct
  source 1..100: mol_type = other RNA
tcctgtcccgatacccgtcaatcccagaacgatcttagtgatcttcgaactcctggcggggctcagccacgctgtaaactagttcaggagatagtcgaca

SEQ ID NO: 1879 - RNA, 100 nt, synthetic construct
  source 1..100: mol_type = other RNA
tcctgtccgaaaacccgctggtcccaagatgatctgtgcgaacttcgaactcctggcggggctcagccacgctgttgtgtagttcaaaggatagtcgaca

SEQ ID NO: 1880 - RNA, 100 nt, synthetic construct
  source 1..100: mol_type = other RNA
tcctgtccgaaaacccgctggtcccaagatgatctgtgcgaacttcgaactcctggcggggctcagccacgctgttgtgtagttcacctgatagtcgaca

SEQ ID NO: 1881 - RNA, 100 nt, synthetic construct
  source 1..100: mol_type = other RNA
tcctgtacaccaaccacaacgtccatccgtgatgcatattcacttcgaactcctggcggggctcagccacgctgtgccctagttcaaacgatagtcgaca

SEQ ID NO: 1882 - RNA, 100 nt, synthetic construct
  source 1..100: mol_type = other RNA
tcctgtacaccaaccacaacgtccatccgtgatgcatattcacttcgaactcctggcggggctcagccacgctgtgccctagttcacctgatagtcgaca

SEQ ID NO: 1883 - RNA, 100 nt, synthetic construct
  source 1..100: mol_type = other RNA
tcctggagcccaacagctacgtcaatgcgtgaaaagtaatcacttcgaactcctggcggggctcagccacgctgatagccagttcaaacgatagtcgaca

SEQ ID NO: 1884 - RNA, 100 nt, synthetic construct
  source 1..100: mol_type = other RNA
tcctggagcccaacagctacgtcaatgcgtgaaaagtaatcacttcgaactcctggcggggctcagccacgctgatagccagttcacctgatagtcgaca

SEQ ID NO: 1885 - RNA, 100 nt, synthetic construct
  source 1..100: mol_type = other RNA
tcctcggccccaaagagtacgtaagagcgtgccggaacatcacttcgaactcctggcggggctcagccacgctgccaggtagttcaacagatagtcgaca

SEQ ID NO: 1886 - RNA, 100 nt, synthetic construct
  source 1..100: mol_type = other RNA
tccaagcccccatagcgtacggagcagcgtactaggccatcacttcgaactcctggcggggctcagccacgctgcctaatagttcaacggatagtcgaca

SEQ ID NO: 1887 - RNA, 100 nt, synthetic construct
  source 1..100: mol_type = other RNA
tccaagcccccatagcgtacggagcagcgtactaggccatcacttcgaactcctggcggggctcagccacgctgcctaatagttcacctgatagtcgaca

SEQ ID NO: 1888 - RNA, 100 nt, synthetic construct
  source 1..100: mol_type = other RNA
tcctgtcccagtacccgtctatcccaggaccagcttccatcacttcgaactcctggcggggctcagccacgctgcgaaacagttcaagcgatagtcgaca

SEQ ID NO: 1889 - RNA, 100 nt, synthetic construct
  source 1..100: mol_type = other RNA
tcctgtccgggaacccgccggtcccataagcctcttccatcacttcgaactcctggcggggctcagccacgctgctatttagttcaggggatagtcgaca

SEQ ID NO: 1890 - RNA, 100 nt, synthetic construct
  source 1..100: mol_type = other RNA
tcctgtcgggcaaccccgccgtcccttttctatcttccatcacttcgaactcctggcggggctcagccacgctgacctgcagttcaagcgatagtcgaca

SEQ ID NO: 1891 - RNA, 100 nt, synthetic construct
  source 1..100: mol_type = other RNA
tcctgtcgaacaaccctatcgtcccttggtgatcaggcatcaccgtctcctcctggcggggctcagccacgctggctaggtgttcacaatatagtcgaca

SEQ ID NO: 1892 - RNA, 100 nt, synthetic construct
  source 1..100: mol_type = other RNA
tcctgtcgaacaaccctatcgtcccttggtgatcaggcatcaccgtctcctcctggcggggctcagccacgctggctaggtgttcacctgatagtcgaca

SEQ ID NO: 1893 - RNA, 100 nt, synthetic construct
  source 1..100: mol_type = other RNA
tcctgtggaccaaccgaaacgtccattcgtgatggcccatcaacgtatactcctggcggggctcagccacgctgggctgccgttcacgaaatagtcgaca

SEQ ID NO: 1894 - RNA, 100 nt, synthetic construct
  source 1..100: mol_type = other RNA
tcctgtggaccaaccgaaacgtccattcgtgatggcccatcaacgtatactcctggcggggctcagccacgctgggctgccgttcacctgatagtcgaca

SEQ ID NO: 1895 - RNA, 100 nt, synthetic construct
  source 1..100: mol_type = other RNA
tcctgcagcccaacagttacgtcaatgcgtgacaatccatctgtctaaactcctggcggggctcagccacgctggggttatgttcacgacatagtcgaca

SEQ ID NO: 1896 - RNA, 100 nt, synthetic construct
  source 1..100: mol_type = other RNA
tcctgcagcccaacagttacgtcaatgcgtgacaatccatctgtctaaactcctggcggggctcagccacgctggggttatgttcacctgatagtcgaca

SEQ ID NO: 1897 - RNA, 100 nt, synthetic construct
  source 1..100: mol_type = other RNA
tcctaaaccccaaggggtacgtgagagcgtgccgttccataccaaggaactcctggcggggctcagccacgctgggggtacgttcacagcatagtcgaca

SEQ ID NO: 1898 - RNA, 100 nt, synthetic construct
  source 1..100: mol_type = other RNA
tcctaaaccccaaggggtacgtgagagcgtgccgttccataccaaggaactcctggcggggctcagccacgctgggggtacgttcacctgatagtcgaca

SEQ ID NO: 1899 - RNA, 100 nt, synthetic construct
  source 1..100: mol_type = other RNA
tccgaccccccacggcgtacgacacagcgttagcttccagggacgcgaactcctggcggggctcagccacgctgggaatatgttcacaaaatagtcgaca

SEQ ID NO: 1900 - RNA, 100 nt, synthetic construct
  source 1..100: mol_type = other RNA
tccgaccccccacggcgtacgacacagcgttagcttccagggacgcgaactcctggcggggctcagccacgctgggaatatgttcacctgatagtcgaca

SEQ ID NO: 1901 - RNA, 100 nt, synthetic construct
  source 1..100: mol_type = other RNA
tcacctcccccctaccgtaccgaccagcgacctcttcctagtaatcgaactcctggcggggctcagccacgctggagtgctgttcacggtatagtcgaca

SEQ ID NO: 1902 - RNA, 100 nt, synthetic construct
  source 1..100: mol_type = other RNA
tcacctcccccctaccgtaccgaccagcgacctcttcctagtaatcgaactcctggcggggctcagccacgctggagtgctgttcacctgatagtcgaca

SEQ ID NO: 1903 - RNA, 100 nt, synthetic construct
  source 1..100: mol_type = other RNA
tcctgtcccaacacccgttattcccagacagatcttataccccttcgaactcctggcggggctcagccacgctggcagtccgttcacaaaatagtcgaca

SEQ ID NO: 1904 - RNA, 100 nt, synthetic construct
  source 1..100: mol_type = other RNA
tcctgtccaaaaacccggtagtcccatattgatctggggaaacttcgaactcctggcggggctcagccacgctggaatatcgttcacacaatagtcgaca

SEQ ID NO: 1905 - RNA, 100 nt, synthetic construct
  source 1..100: mol_type = other RNA
tcctgtccaaaaacccggtagtcccatattgatctggggaaacttcgaactcctggcggggctcagccacgctggaatatcgttcacctgatagtcgaca

SEQ ID NO: 1906 - RNA, 100 nt, synthetic construct
  source 1..100: mol_type = other RNA
tcctgtcgggcaacccattcgtcccttagtgatccggaaccacttcgaactcctggcggggctcagccacgctggccggttgttcacggtatagtcgaca

SEQ ID NO: 1907 - RNA, 100 nt, synthetic construct
  source 1..100: mol_type = other RNA
tcctgtcgggcaacccattcgtcccttagtgatccggaaccacttcgaactcctggcggggctcagccacgctggccggttgttcacctgatagtcgaca

SEQ ID NO: 1908 - RNA, 100 nt, synthetic construct
  source 1..100: mol_type = other RNA
tcctgtaagccaaccaagacgtccatccgtgatagcgactcacttcgaactcctggcggggctcagccacgctggaggcttgttcacaccatagtcgaca

SEQ ID NO: 1909 - RNA, 100 nt, synthetic construct
  source 1..100: mol_type = other RNA
tcctgtaagccaaccaagacgtccatccgtgatagcgactcacttcgaactcctggcggggctcagccacgctggaggcttgttcacctgatagtcgaca

SEQ ID NO: 1910 - RNA, 100 nt, synthetic construct
  source 1..100: mol_type = other RNA
tcctgggacccaacaactacgtcgacgcgtgaatatggatcacttcgaactcctggcggggctcagccacgctggccccttgttcacgacatagtcgaca

SEQ ID NO: 1911 - RNA, 100 nt, synthetic construct
  source 1..100: mol_type = other RNA
tcctgggacccaacaactacgtcgacgcgtgaatatggatcacttcgaactcctggcggggctcagccacgctggccccttgttcacctgatagtcgaca

SEQ ID NO: 1912 - RNA, 100 nt, synthetic construct
  source 1..100: mol_type = other RNA
tccttgaccccaagaagtacgtgggagcgtgcctccgcatcacttcgaactcctggcggggctcagccacgctggaaggttgttcacgatatagtcgaca

SEQ ID NO: 1913 - RNA, 100 nt, synthetic construct
  source 1..100: mol_type = other RNA
tccttgaccccaagaagtacgtgggagcgtgcctccgcatcacttcgaactcctggcggggctcagccacgctggaaggttgttcacctgatagtcgaca

SEQ ID NO: 1914 - RNA, 100 nt, synthetic construct
  source 1..100: mol_type = other RNA
tccatccccccatggcgtacgcaacagcgtacgggcccatcacttcgaactcctggcggggctcagccacgctggggatccgttcacggcatagtcgaca

SEQ ID NO: 1915 - RNA, 100 nt, synthetic construct
  source 1..100: mol_type = other RNA
tccatccccccatggcgtacgcaacagcgtacgggcccatcacttcgaactcctggcggggctcagccacgctggggatccgttcacctgatagtcgaca

SEQ ID NO: 1916 - RNA, 100 nt, synthetic construct
  source 1..100: mol_type = other RNA
tcagttcccccctgccgtactagccagcggttgcgtccatcacttcgaactcctggcggggctcagccacgctggaactgtgttcacattatagtcgaca

SEQ ID NO: 1917 - RNA, 100 nt, synthetic construct
  source 1..100: mol_type = other RNA
tcagttcccccctgccgtactagccagcggttgcgtccatcacttcgaactcctggcggggctcagccacgctggaactgtgttcacctgatagtcgaca

SEQ ID NO: 1918 - RNA, 100 nt, synthetic construct
  source 1..100: mol_type = other RNA
tcctgtcccgatacccgttaatcccaggagccccttccatcacttcgaactcctggcggggctcagccacgctggcggcccgttcacatcatagtcgaca

SEQ ID NO: 1919 - RNA, 100 nt, synthetic construct
  source 1..100: mol_type = other RNA
tcctgtcccgatacccgttaatcccaggagccccttccatcacttcgaactcctggcggggctcagccacgctggcggcccgttcacctgatagtcgaca

SEQ ID NO: 1920 - RNA, 100 nt, synthetic construct
  source 1..100: mol_type = other RNA
tcctgtccaggaacccggcggtcccaaatccttcttccatcacttcgaactcctggcggggctcagccacgctggagatgtgttcacaccatagtcgaca

SEQ ID NO: 1921 - RNA, 100 nt, synthetic construct
  source 1..100: mol_type = other RNA
tcctgtccaggaacccggcggtcccaaatccttcttccatcacttcgaactcctggcggggctcagccacgctggagatgtgttcacctgatagtcgaca

SEQ ID NO: 1922 - RNA, 100 nt, synthetic construct
  source 1..100: mol_type = other RNA
tcctgtccacaaacccggtagtcccattttgatctcgaatcactacaatgtcctggcggggctcagccacgctggtaacattttcaccgcttagtcgaca

SEQ ID NO: 1923 - RNA, 100 nt, synthetic construct
  source 1..100: mol_type = other RNA
tcctgtccacaaacccggtagtcccattttgatctcgaatcactacaatgtcctggcggggctcagccacgctggtaacattttcacctgatagtcgaca

SEQ ID NO: 1924 - RNA, 100 nt, synthetic construct
  source 1..100: mol_type = other RNA
tcctgtcacacaacccatccgtccctcggtgatcgtacatcaccaatgcctcctggcggggctcagccacgctggtaatgctttcaccgtttagtcgaca

SEQ ID NO: 1925 - RNA, 100 nt, synthetic construct
  source 1..100: mol_type = other RNA
tcctgtcacacaacccatccgtccctcggtgatcgtacatcaccaatgcctcctggcggggctcagccacgctggtaatgctttcacctgatagtcgaca

SEQ ID NO: 1926 - RNA, 100 nt, synthetic construct
  source 1..100: mol_type = other RNA
tcctgtaggccaaccataacgtccattcgtgatgcgccatcaatacatactcctggcggggctcagccacgctggtatactcttcaccccctagtcgaca

SEQ ID NO: 1927 - RNA, 100 nt, synthetic construct
  source 1..100: mol_type = other RNA
tcctgtaggccaaccataacgtccattcgtgatgcgccatcaatacatactcctggcggggctcagccacgctggtatactcttcacctgatagtcgaca

SEQ ID NO: 1928 - RNA, 100 nt, synthetic construct
  source 1..100: mol_type = other RNA
tcctgcgacccaacgaatacgtcgacgcgtgagaatccatctgggaaaactcctggcggggctcagccacgctggtgatacattcaccccctagtcgaca

SEQ ID NO: 1929 - RNA, 100 nt, synthetic construct
  source 1..100: mol_type = other RNA
tcctgcgacccaacgaatacgtcgacgcgtgagaatccatctgggaaaactcctggcggggctcagccacgctggtgatacattcacctgatagtcgaca

SEQ ID NO: 1930 - RNA, 100 nt, synthetic construct
  source 1..100: mol_type = other RNA
tccttaaccccaagaggtacgtaagagcgtgtaattccatatgggggaactcctggcggggctcagccacgctggtgggcaattcacccactagtcgaca

SEQ ID NO: 1931 - RNA, 100 nt, synthetic construct
  source 1..100: mol_type = other RNA
tccttaaccccaagaggtacgtaagagcgtgtaattccatatgggggaactcctggcggggctcagccacgctggtgggcaattcacctgatagtcgaca

SEQ ID NO: 1932 - RNA, 100 nt, synthetic construct
  source 1..100: mol_type = other RNA
tccccacccccatagcgtacgcaacagcgtacccttccaaagtagcgaactcctggcggggctcagccacgctggtacccttttcaccgcctagtcgaca

SEQ ID NO: 1933 - RNA, 100 nt, synthetic construct
  source 1..100: mol_type = other RNA
tccccacccccatagcgtacgcaacagcgtacccttccaaagtagcgaactcctggcggggctcagccacgctggtacccttttcacctgatagtcgaca

SEQ ID NO: 1934 - RNA, 100 nt, synthetic construct
  source 1..100: mol_type = other RNA
tcgaatccccctcgccgtacacaccagcgatctcttccctagtgtcgaactcctggcggggctcagccacgctggtattaccttcaccgtctagtcgaca

SEQ ID NO: 1935 - RNA, 100 nt, synthetic construct
  source 1..100: mol_type = other RNA
tcgaatccccctcgccgtacacaccagcgatctcttccctagtgtcgaactcctggcggggctcagccacgctggtattaccttcacctgatagtcgaca

SEQ ID NO: 1936 - RNA, 100 nt, synthetic construct
  source 1..100: mol_type = other RNA
tcctgtcccaatacccgtcaatcccaggcagatcttggccttcttcgaactcctggcggggctcagccacgctggtaattacttcaccctttagtcgaca

SEQ ID NO: 1937 - RNA, 100 nt, synthetic construct
  source 1..100: mol_type = other RNA
tcctgtcccaatacccgtcaatcccaggcagatcttggccttcttcgaactcctggcggggctcagccacgctggtaattacttcacctgatagtcgaca

SEQ ID NO: 1938 - RNA, 100 nt, synthetic construct
  source 1..100: mol_type = other RNA
tcctgtccacaaacccggcggtcccatattgatctaggttaacttcgaactcctggcggggctcagccacgctggtgaactattcaccccttagtcgaca

SEQ ID NO: 1939 - RNA, 100 nt, synthetic construct
  source 1..100: mol_type = other RNA
tcctgtccacaaacccggcggtcccatattgatctaggttaacttcgaactcctggcggggctcagccacgctggtgaactattcacctgatagtcgaca

SEQ ID NO: 1940 - RNA, 100 nt, synthetic construct
  source 1..100: mol_type = other RNA
tcctgtcgggcaacccagccgtcccctagtgatcagtagacacttcgaactcctggcggggctcagccacgctggtgcctacttcacccattagtcgaca

SEQ ID NO: 1941 - RNA, 100 nt, synthetic construct
  source 1..100: mol_type = other RNA
tcctgtcgggcaacccagccgtcccctagtgatcagtagacacttcgaactcctggcggggctcagccacgctggtgcctacttcacctgatagtcgaca

SEQ ID NO: 1942 - RNA, 100 nt, synthetic construct
  source 1..100: mol_type = other RNA
tcctgtgaaccaaccataacgtccatacgtgatagttactcacttcgaactcctggcggggctcagccacgctggtagctccttcaccatctagtcgaca

SEQ ID NO: 1943 - RNA, 100 nt, synthetic construct
  source 1..100: mol_type = other RNA
tcctgtgaaccaaccataacgtccatacgtgatagttactcacttcgaactcctggcggggctcagccacgctggtagctccttcacctgatagtcgaca

SEQ ID NO: 1944 - RNA, 100 nt, synthetic construct
  source 1..100: mol_type = other RNA
tcctgggacccaacatatacgtcgatgcgtgagagacaatcacttcgaactcctggcggggctcagccacgctggtccctgcttcacccattagtcgaca

SEQ ID NO: 1945 - RNA, 100 nt, synthetic construct
  source 1..100: mol_type = other RNA
tcctgggacccaacatatacgtcgatgcgtgagagacaatcacttcgaactcctggcggggctcagccacgctggtccctgcttcacctgatagtcgaca

SEQ ID NO: 1946 - RNA, 100 nt, synthetic construct
  source 1..100: mol_type = other RNA
tccttgaccccaaggggtacgtgaaagcgtgctggcgcatcacttcgaactcctggcggggctcagccacgctggtgacttcttcaccctttagtcgaca

SEQ ID NO: 1947 - RNA, 100 nt, synthetic construct
  source 1..100: mol_type = other RNA
tccttgaccccaaggggtacgtgaaagcgtgctggcgcatcacttcgaactcctggcggggctcagccacgctggtgacttcttcacctgatagtcgaca

SEQ ID NO: 1948 - RNA, 100 nt, synthetic construct
  source 1..100: mol_type = other RNA
tccccccccccataacgtacggcacagcgttcgaaaccatcacttcgaactcctggcggggctcagccacgctggtaacctcttcaccgcctagtcgaca

SEQ ID NO: 1949 - RNA, 100 nt, synthetic construct
  source 1..100: mol_type = other RNA
tccccccccccataacgtacggcacagcgttcgaaaccatcacttcgaactcctggcggggctcagccacgctggtaacctcttcacctgatagtcgaca

SEQ ID NO: 1950 - RNA, 100 nt, synthetic construct
  source 1..100: mol_type = other RNA
tcaaatccccctcgccgtactagccagcgcaggagtccatcacttcgaactcctggcggggctcagccacgctggtgaaccattcaccacctagtcgaca

SEQ ID NO: 1951 - RNA, 100 nt, synthetic construct
  source 1..100: mol_type = other RNA
tcaaatccccctcgccgtactagccagcgcaggagtccatcacttcgaactcctggcggggctcagccacgctggtgaaccattcacctgatagtcgaca

SEQ ID NO: 1952 - RNA, 100 nt, synthetic construct
  source 1..100: mol_type = other RNA
tcctgtcccggcacccgtttctcccagatattccttccatcacttcgaactcctggcggggctcagccacgctggtgttcttttcaccggttagtcgaca

SEQ ID NO: 1953 - RNA, 100 nt, synthetic construct
  source 1..100: mol_type = other RNA
tcctgtccacaaacccgaaagtcccaaatctctcttccatcacttcgaactcctggcggggctcagccacgctggtattgttttcaccggttagtcgaca

SEQ ID NO: 1954 - RNA, 100 nt, synthetic construct
  source 1..100: mol_type = other RNA
tcctgtccacaaacccgaaagtcccaaatctctcttccatcacttcgaactcctggcggggctcagccacgctggtattgttttcacctgatagtcgaca

SEQ ID NO: 1955 - RNA, 100 nt, synthetic construct
  source 1..100: mol_type = other RNA
tcctgtcaagcaacccattcgtccccttcacatcttccatcacttcgaactcctggcggggctcagccacgctggtgcccgtttcaccatttagtcgaca

SEQ ID NO: 1956 - RNA, 100 nt, synthetic construct
  source 1..100: mol_type = other RNA
tcctgtcaagcaacccattcgtccccttcacatcttccatcacttcgaactcctggcggggctcagccacgctggtgcccgtttcacctgatagtcgaca

SEQ ID NO: 1957 - RNA, 100 nt, synthetic construct
  source 1..100: mol_type = other RNA
tcctgtcaggcaacccccccgtcccccagtgatcatacatcacgctcatctcctggcggggctcagccacgctggttgcgttctcacctatcagtcgaca

SEQ ID NO: 1958 - RNA, 100 nt, synthetic construct
  source 1..100: mol_type = other RNA
tcctgtcaggcaacccccccgtcccccagtgatcatacatcacgctcatctcctggcggggctcagccacgctggttgcgttctcacctgatagtcgaca

SEQ ID NO: 1959 - RNA, 100 nt, synthetic construct
  source 1..100: mol_type = other RNA
tcctgtgggccaaccgacacgtccgttcgtgatgagccatcagacaacactcctggcggggctcagccacgctggttgctccatcaccttacagtcgaca

SEQ ID NO: 1960 - RNA, 100 nt, synthetic construct
  source 1..100: mol_type = other RNA
tcctgtgggccaaccgacacgtccgttcgtgatgagccatcagacaacactcctggcggggctcagccacgctggttgctccatcacctgatagtcgaca

SEQ ID NO: 1961 - RNA, 100 nt, synthetic construct
  source 1..100: mol_type = other RNA
tcctgcaacccaacagctacgtcaatgcgtgaaagtccatctgacaaaactcctggcggggctcagccacgctggttagcgaatcacctaacagtcgaca

SEQ ID NO: 1962 - RNA, 100 nt, synthetic construct
  source 1..100: mol_type = other RNA
tcctgcaacccaacagctacgtcaatgcgtgaaagtccatctgacaaaactcctggcggggctcagccacgctggttagcgaatcacctgatagtcgaca

SEQ ID NO: 1963 - RNA, 100 nt, synthetic construct
  source 1..100: mol_type = other RNA
tccggacccccatgacgtacgaaacagcgttaccttccaattaaacgaactcctggcggggctcagccacgctggttgcgccctcacctaccagtcgaca

SEQ ID NO: 1964 - RNA, 100 nt, synthetic construct
  source 1..100: mol_type = other RNA
tccggacccccatgacgtacgaaacagcgttaccttccaattaaacgaactcctggcggggctcagccacgctggttgcgccctcacctgatagtcgaca

SEQ ID NO: 1965 - RNA, 100 nt, synthetic construct
  source 1..100: mol_type = other RNA
tcaaatccccccaaccgtactgaccagcgcattcttccccgtgatcgaactcctggcggggctcagccacgctggttactctctcaccttccagtcgaca

SEQ ID NO: 1966 - RNA, 100 nt, synthetic construct
  source 1..100: mol_type = other RNA
tcaaatccccccaaccgtactgaccagcgcattcttccccgtgatcgaactcctggcggggctcagccacgctggttactctctcacctgatagtcgaca

SEQ ID NO: 1967 - RNA, 100 nt, synthetic construct
  source 1..100: mol_type = other RNA
tcctgtcccagcacccgtcattcccagaccgatcttaatggtcttcgaactcctggcggggctcagccacgctggttgctcactcacctacaagtcgaca

SEQ ID NO: 1968 - RNA, 100 nt, synthetic construct
  source 1..100: mol_type = other RNA
tcctgtcccagcacccgtcattcccagaccgatcttaatggtcttcgaactcctggcggggctcagccacgctggttgctcactcacctgatagtcgaca

SEQ ID NO: 1969 - RNA, 100 nt, synthetic construct
  source 1..100: mol_type = other RNA
tcctgtccaagaacccggaagtcccacactgatctagatggacttcgaactcctggcggggctcagccacgctggttacgcaatcacctaacagtcgaca

SEQ ID NO: 1970 - RNA, 100 nt, synthetic construct
  source 1..100: mol_type = other RNA
tcctgtccaagaacccggaagtcccacactgatctagatggacttcgaactcctggcggggctcagccacgctggttacgcaatcacctgatagtcgaca

SEQ ID NO: 1971 - RNA, 100 nt, synthetic construct
  source 1..100: mol_type = other RNA
tcctgtcaggcaaccctatcgtccctaagtgatcgaaggacacttcgaactcctggcggggctcagccacgctggttgctcactcacctacgagtcgaca

SEQ ID NO: 1972 - RNA, 100 nt, synthetic construct
  source 1..100: mol_type = other RNA
tcctgtcaggcaaccctatcgtccctaagtgatcgaaggacacttcgaactcctggcggggctcagccacgctggttgctcactcacctgatagtcgaca

SEQ ID NO: 1973 - RNA, 100 nt, synthetic construct
  source 1..100: mol_type = other RNA
tcctgtaggccaaccaccacgtccattcgtgataaaatttcacttcgaactcctggcggggctcagccacgctggttaatccatcacctatcagtcgaca

SEQ ID NO: 1974 - RNA, 100 nt, synthetic construct
  source 1..100: mol_type = other RNA
tcctgtaggccaaccaccacgtccattcgtgataaaatttcacttcgaactcctggcggggctcagccacgctggttaatccatcacctgatagtcgaca

SEQ ID NO: 1975 - RNA, 100 nt, synthetic construct
  source 1..100: mol_type = other RNA
tcctgaagcccaacggatacgtcggcgcgtgacagcgaatcacttcgaactcctggcggggctcagccacgctggttgttcagtcacctacaagtcgaca

SEQ ID NO: 1976 - RNA, 100 nt, synthetic construct
  source 1..100: mol_type = other RNA
tcctgaagcccaacggatacgtcggcgcgtgacagcgaatcacttcgaactcctggcggggctcagccacgctggttgttcagtcacctgatagtcgaca

SEQ ID NO: 1977 - RNA, 100 nt, synthetic construct
  source 1..100: mol_type = other RNA
tcctccaccccaagaagtacgtggaagcgtgcggaagcatcacttcgaactcctggcggggctcagccacgctggttatcgcgtcacctttcagtcgaca

SEQ ID NO: 1978 - RNA, 100 nt, synthetic construct
  source 1..100: mol_type = other RNA
tcctccaccccaagaagtacgtggaagcgtgcggaagcatcacttcgaactcctggcggggctcagccacgctggttatcgcgtcacctgatagtcgaca

SEQ ID NO: 1979 - RNA, 100 nt, synthetic construct
  source 1..100: mol_type = other RNA
tccgcccccccacagcgtacggtacagcgtcctgagccatcacttcgaactcctggcggggctcagccacgctggttgcgctatcacctaacagtcgaca

SEQ ID NO: 1980 - RNA, 100 nt, synthetic construct
  source 1..100: mol_type = other RNA
tcaactcccccctgccgtactggccagcgcaactatccatcacttcgaactcctggcggggctcagccacgctggttgttcggtcaccttacagtcgaca

SEQ ID NO: 1981 - RNA, 100 nt, synthetic construct
  source 1..100: mol_type = other RNA
tcaactcccccctgccgtactggccagcgcaactatccatcacttcgaactcctggcggggctcagccacgctggttgttcggtcacctgatagtcgaca

SEQ ID NO: 1982 - RNA, 100 nt, synthetic construct
  source 1..100: mol_type = other RNA
tcctgtcccaacacccgttaatcccaggacctgcttccatcacttcgaactcctggcggggctcagccacgctggttatcctgtcacctatgagtcgaca

SEQ ID NO: 1983 - RNA, 100 nt, synthetic construct
  source 1..100: mol_type = other RNA
tcctgtcccaacacccgttaatcccaggacctgcttccatcacttcgaactcctggcggggctcagccacgctggttatcctgtcacctgatagtcgaca

SEQ ID NO: 1984 - RNA, 100 nt, synthetic construct
  source 1..100: mol_type = other RNA
tcctgtccaggaacccggcggtcccaaatatctcttccatcacttcgaactcctggcggggctcagccacgctggttacgtcctcacctttcagtcgaca

SEQ ID NO: 1985 - RNA, 100 nt, synthetic construct
  source 1..100: mol_type = other RNA
tcctgtccaggaacccggcggtcccaaatatctcttccatcacttcgaactcctggcggggctcagccacgctggttacgtcctcacctgatagtcgaca

SEQ ID NO: 1986 - RNA, 100 nt, synthetic construct
  source 1..100: mol_type = other RNA
tcctgtcgggcaaccctctcgtcccctgatcatcttccatcacttcgaactcctggcggggctcagccacgctggttaagctctcacctctgagtcgaca

SEQ ID NO: 1987 - RNA, 100 nt, synthetic construct
  source 1..100: mol_type = other RNA
tcctgtcgggcaaccctctcgtcccctgatcatcttccatcacttcgaactcctggcggggctcagccacgctggttaagctctcacctgatagtcgaca

SEQ ID NO: 1988 - RNA, 100 nt, synthetic construct
  source 1..100: mol_type = other RNA
tcctgtccacaaacccgaaagtcccacattgatctggaatcactccttcatcctggcggggctcagccacgctggttccgcccgcacctgcgtgtcgaca

SEQ ID NO: 1989 - RNA, 100 nt, synthetic construct
  source 1..100: mol_type = other RNA
tcctgtccacaaacccgaaagtcccacattgatctggaatcactccttcatcctggcggggctcagccacgctggttccgcccgcacctgatagtcgaca

SEQ ID NO: 1990 - RNA, 100 nt, synthetic construct
  source 1..100: mol_type = other RNA
tcctgtcgagcaacccaaccgtcccttagtgatcgcgcatcacaggtgtctcctggcggggctcagccacgctggttccggacacacctgcttgtcgaca

SEQ ID NO: 1991 - RNA, 100 nt, synthetic construct
  source 1..100: mol_type = other RNA
tcctgtcgagcaacccaaccgtcccttagtgatcgcgcatcacaggtgtctcctggcggggctcagccacgctggttccggacacacctgatagtcgaca

SEQ ID NO: 1992 - RNA, 100 nt, synthetic construct
  source 1..100: mol_type = other RNA
tcctgtgaaccaaccacaacgtccgcccgtgataaaccatcagccatcactcctggcggggctcagccacgctggttctgatgacacctgcgcgtcgaca

SEQ ID NO: 1993 - RNA, 100 nt, synthetic construct
  source 1..100: mol_type = other RNA
tcctgtgaaccaaccacaacgtccgcccgtgataaaccatcagccatcactcctggcggggctcagccacgctggttctgatgacacctgatagtcgaca

SEQ ID NO: 1994 - RNA, 100 nt, synthetic construct
  source 1..100: mol_type = other RNA
tcctgcaacccaacgaatacgtcaacgcgtgacggtccatctccgtaaactcctggcggggctcagccacgctggttctttttccacctgtgcgtcgaca

SEQ ID NO: 1995 - RNA, 100 nt, synthetic construct
  source 1..100: mol_type = other RNA
tcctgcaacccaacgaatacgtcaacgcgtgacggtccatctccgtaaactcctggcggggctcagccacgctggttctttttccacctgatagtcgaca

SEQ ID NO: 1996 - RNA, 100 nt, synthetic construct
  source 1..100: mol_type = other RNA
tccaagcccccatgacgtacggcacagcgtctacttccaggtgtccgaactcctggcggggctcagccacgctggttctatatgcacctgcctgtcgaca

SEQ ID NO: 1997 - RNA, 100 nt, synthetic construct
  source 1..100: mol_type = other RNA
tccaagcccccatgacgtacggcacagcgtctacttccaggtgtccgaactcctggcggggctcagccacgctggttctatatgcacctgatagtcgaca

SEQ ID NO: 1998 - RNA, 100 nt, synthetic construct
  source 1..100: mol_type = other RNA
tcaattccccctcaccgtacaggccagcgcattcttcctgcgggtcgaactcctggcggggctcagccacgctggttcccgtcacacctgctcgtcgaca

SEQ ID NO: 1999 - RNA, 100 nt, synthetic construct
  source 1..100: mol_type = other RNA
tcaattccccctcaccgtacaggccagcgcattcttcctgcgggtcgaactcctggcggggctcagccacgctggttcccgtcacacctgatagtcgaca

SEQ ID NO: 2000 - RNA, 100 nt, synthetic construct
  source 1..100: mol_type = other RNA
tcctgtcccgatacccgttattcccaggaagatcttgagcctcttcgaactcctggcggggctcagccacgctggttctcctcgcacctgtgcgtcgaca

SEQ ID NO: 2001 - RNA, 100 nt, synthetic construct
  source 1..100: mol_type = other RNA
tcctgtcccgatacccgttattcccaggaagatcttgagcctcttcgaactcctggcggggctcagccacgctggttctcctcgcacctgatagtcgaca

SEQ ID NO: 2002 - RNA, 100 nt, synthetic construct
  source 1..100: mol_type = other RNA
tcctgtccaaaaacccgccggtcccaaattgatctaaggcgacttcgaactcctggcggggctcagccacgctggttcctgccgcacctgcatgtcgaca

SEQ ID NO: 2003 - RNA, 100 nt, synthetic construct
  source 1..100: mol_type = other RNA
tcctgtccaaaaacccgccggtcccaaattgatctaaggcgacttcgaactcctggcggggctcagccacgctggttcctgccgcacctgatagtcgaca

SEQ ID NO: 2004 - RNA, 100 nt, synthetic construct
  source 1..100: mol_type = other RNA
tcctgtcaggcaaccccgccgtcccccggtgatcgaggaacacttcgaactcctggcggggctcagccacgctggttccttcggcacctgtccgtcgaca

SEQ ID NO: 2005 - RNA, 100 nt, synthetic construct
  source 1..100: mol_type = other RNA
tcctgtcaggcaaccccgccgtcccccggtgatcgaggaacacttcgaactcctggcggggctcagccacgctggttccttcggcacctgatagtcgaca

SEQ ID NO: 2006 - RNA, 100 nt, synthetic construct
  source 1..100: mol_type = other RNA
tcctgtgaaccaaccatcacgtccaaccgtgatactaattcacttcgaactcctggcggggctcagccacgctggttcccttgccacctgtgcgtcgaca

SEQ ID NO: 2007 - RNA, 100 nt, synthetic construct
  source 1..100: mol_type = other RNA
tcctgtgaaccaaccatcacgtccaaccgtgatactaattcacttcgaactcctggcggggctcagccacgctggttcccttgccacctgatagtcgaca

SEQ ID NO: 2008 - RNA, 100 nt, synthetic construct
  source 1..100: mol_type = other RNA
tcctggaacccaacaattacgtcggtgcgtgagccaagatcacttcgaactcctggcggggctcagccacgctggttcccacggcacctgcttgtcgaca

SEQ ID NO: 2009 - RNA, 100 nt, synthetic construct
  source 1..100: mol_type = other RNA
tcctggaacccaacaattacgtcggtgcgtgagccaagatcacttcgaactcctggcggggctcagccacgctggttcccacggcacctgatagtcgaca

SEQ ID NO: 2010 - RNA, 100 nt, synthetic construct
  source 1..100: mol_type = other RNA
tccttagccccaaaaagtacgtgaaagcgtgtagaagcatcacttcgaactcctggcggggctcagccacgctggttctttcaacacctgatagtcgaca

SEQ ID NO: 2011 - RNA, 100 nt, synthetic construct
  source 1..100: mol_type = other RNA
tccgggcccccatcacgtacggcacagcgttccacaccatcacttcgaactcctggcggggctcagccacgctggttctctttgcacctgcatgtcgaca

SEQ ID NO: 2012 - RNA, 100 nt, synthetic construct
  source 1..100: mol_type = other RNA
tccgggcccccatcacgtacggcacagcgttccacaccatcacttcgaactcctggcggggctcagccacgctggttctctttgcacctgatagtcgaca

SEQ ID NO: 2013 - RNA, 100 nt, synthetic construct
  source 1..100: mol_type = other RNA
tcctgtcccgacacccgtctctcccagagctcacttccatcacttcgaactcctggcggggctcagccacgctggttcccctcacacctgtatgtcgaca

SEQ ID NO: 2014 - RNA, 100 nt, synthetic construct
  source 1..100: mol_type = other RNA
tcctgtcccgacacccgtctctcccagagctcacttccatcacttcgaactcctggcggggctcagccacgctggttcccctcacacctgatagtcgaca

SEQ ID NO: 2015 - RNA, 100 nt, synthetic construct
  source 1..100: mol_type = other RNA
tcctgtccaagaacccgatggtcccataagattcttccatcacttcgaactcctggcggggctcagccacgctggttcctcaagcacctgcgcgtcgaca

SEQ ID NO: 2016 - RNA, 100 nt, synthetic construct
  source 1..100: mol_type = other RNA
tcctgtccaagaacccgatggtcccataagattcttccatcacttcgaactcctggcggggctcagccacgctggttcctcaagcacctgatagtcgaca

SEQ ID NO: 2017 - RNA, 100 nt, synthetic construct
  source 1..100: mol_type = other RNA
tcctgtcaaacaacccacccgtccccttattatcttccatcacttcgaactcctggcggggctcagccacgctggttctcgcggcacctgcacgtcgaca

SEQ ID NO: 2018 - RNA, 100 nt, synthetic construct
  source 1..100: mol_type = other RNA
tcctgtcaaacaacccacccgtccccttattatcttccatcacttcgaactcctggcggggctcagccacgctggttctcgcggcacctgatagtcgaca

SEQ ID NO: 2019 - RNA, 100 nt, synthetic construct
  source 1..100: mol_type = other RNA
tcacatcccccctgccgtacctaccagcgatttcttccccgggatcgaagtcctggtgggactcagccacgctgtttcaaagttcacctatcgcccgaca

SEQ ID NO: 2020 - RNA, 100 nt, synthetic construct
  source 1..100: mol_type = other RNA
tcctgtcccccaacccgtacgtcccagcgtgatcttcccaatggtcgaacttctggcgaggttcagccacgcttgttcaaagttcacctacctcgcgaca

SEQ ID NO: 2021 - RNA, 100 nt, synthetic construct
  source 1..100: mol_type = other RNA
tcagatcccccccgccgtactggccagcgccctcttcccaatggtcgaacttctggcgaggttcagccacgcttgttcaaagttcacctacctcgcgaca

SEQ ID NO: 2022 - RNA, 100 nt, synthetic construct
  source 1..100: mol_type = other RNA
tcctgtcccccaacccgtacgtcccagcgtgtttcaacatcacttcgaacttctggcgaggttcagccacgcttgttcctcgcacacctgatagtcgaca

SEQ ID NO: 2023 - RNA, 100 nt, synthetic construct
  source 1..100: mol_type = other RNA
tcctaggccccaaggggtacgtgagagcgtgtttcaacatcacttcgaacttctggcgaggttcagccacgcttgttcctcgcacacctgcatgtcgaca

SEQ ID NO: 2024 - RNA, 100 nt, synthetic construct
  source 1..100: mol_type = other RNA
tcctaggccccaaggggtacgtgagagcgtgtttcaacatcacttcgaacttctggcgaggttcagccacgcttgttcctcgcacacctgatagtcgaca

SEQ ID NO: 2025 - RNA, 100 nt, synthetic construct
  source 1..100: mol_type = other RNA
tcaactccccctcgccgtacacaccagcgctctcttccctgtggtcgaactcctggcggtgcttagccacgctgattcaatgttcaccttctttgcgaca

SEQ ID NO: 2026 - RNA, 100 nt, synthetic construct
  source 1..100: mol_type = other RNA
tcctaaaccccaagaagtacgtaggagcgtgtttcaacatcacttcgaactcctggcggtgcttagccacgctgattccatacacacctgtttgtcgaca

SEQ ID NO: 2027 - RNA, 100 nt, synthetic construct
  source 1..100: mol_type = other RNA
tcctaaaccccaagaagtacgtaggagcgtgtttcaacatcacttcgaactcctggcggtgcttagccacgctgattccatacacacctgatagtcgaca

SEQ ID NO: 2028 - RNA, 100 nt, synthetic construct
  source 1..100: mol_type = other RNA
tcgattcccccctaccgtaccaaccagcgatctcttcccgtaggtcgaactcctgggggggctcagccacgctgtttcaaagttcaccttcataccgaca

SEQ ID NO: 2029 - RNA, 100 nt, synthetic construct
  source 1..100: mol_type = other RNA
tcctccgccccaaagggtacgtggaagcgtgtttcaacatcacttcgaactcctgggggggctcagccacgctgtttctctagacacctgcgcgtcgaca

SEQ ID NO: 2030 - RNA, 100 nt, synthetic construct
  source 1..100: mol_type = other RNA
tcctccgccccaaagggtacgtggaagcgtgtttcaacatcacttcgaactcctgggggggctcagccacgctgtttctctagacacctgatagtcgaca

SEQ ID NO: 2031 - RNA, 100 nt, synthetic construct
  source 1..100: mol_type = other RNA
tcagttcccccttaccgtacacgccagcgccttcttcctatgaatcgaactcctggcggggctcatccacgctgtatcaaagttcacttagcgcccgaca

SEQ ID NO: 2032 - RNA, 100 nt, synthetic construct
  source 1..100: mol_type = other RNA
tcctctaccccaaggggtacgtaggagcgtgtttcaacatcacttcgaactcctggcggggctcatccacgctgtatcctaccccacctgtttgtcgaca

SEQ ID NO: 2033 - RNA, 100 nt, synthetic construct
  source 1..100: mol_type = other RNA
tcctctaccccaaggggtacgtaggagcgtgtttcaacatcacttcgaactcctggcggggctcatccacgctgtatcctaccccacctgatagtcgaca

SEQ ID NO: 2034 - RNA, 100 nt, synthetic construct
  source 1..100: mol_type = other RNA
tcctgtcccccaacccgtacgtcccagcgtgatcttcccaattgtcgaatttctggcgggcctcagccacgctgattcaaagttcacctaagccacgaca

SEQ ID NO: 2035 - RNA, 100 nt, synthetic construct
  source 1..100: mol_type = other RNA
tcagatcccccttaccgtacaggccagcgccctcttcccaattgtcgaatttctggcgggcctcagccacgctgattcaaagttcacctaagccacgaca

SEQ ID NO: 2036 - RNA, 100 nt, synthetic construct
  source 1..100: mol_type = other RNA
tcctcggccccaaggggtacgtgggagcgtgtttcaacatcacttcgaatttctggcgggcctcagccacgctgattctatatccacctgctcgtcgaca

SEQ ID NO: 2037 - RNA, 100 nt, synthetic construct
  source 1..100: mol_type = other RNA
tcctcggccccaaggggtacgtgggagcgtgtttcaacatcacttcgaatttctggcgggcctcagccacgctgattctatatccacctgatagtcgaca

SEQ ID NO: 2038 - RNA, 100 nt, synthetic construct
  source 1..100: mol_type = other RNA
tcaattccccctcaccgtacataccagcgcattcttcctaagtctcgaactgctggcggagctcagccacgctgtttcaaagttcacctaagttgcgaca

SEQ ID NO: 2039 - RNA, 100 nt, synthetic construct
  source 1..100: mol_type = other RNA
tcctataccccaaagagtacgtgggagcgtgtttcaacatcacttcgaactgctggcggagctcagccacgctgtttcccctagcacctgtttgtcgaca

SEQ ID NO: 2040 - RNA, 100 nt, synthetic construct
  source 1..100: mol_type = other RNA
tcctataccccaaagagtacgtgggagcgtgtttcaacatcacttcgaactgctggcggagctcagccacgctgtttcccctagcacctgatagtcgaca

SEQ ID NO: 2041 - RNA, 100 nt, synthetic construct
  source 1..100: mol_type = other RNA
tcaattcccccccgccgtacaggccagcgaattcttcctacgtctcgaattcctggcggaacttagccacgctgcttcaaagttcacctaagctgcgaca

SEQ ID NO: 2042 - RNA, 100 nt, synthetic construct
  source 1..100: mol_type = other RNA
tcctgtcccccaacccgtacgtcccagcgtgtttcaacatcacttcgaattcctggcggaacttagccacgctgcttctgcctgcacctgatagtcgaca

SEQ ID NO: 2043 - RNA, 100 nt, synthetic construct
  source 1..100: mol_type = other RNA
tccttagccccaaggggtacgtgagagcgtgtttcaacatcacttcgaattcctggcggaacttagccacgctgcttctgcctgcacctgatagtcgaca

SEQ ID NO: 2044 - RNA, 100 nt, synthetic construct
  source 1..100: mol_type = other RNA
tcctgtcccccaacccgtacgtcccagcgtgatcttcctgccggtcgaactcctggcggagcttagccacgctgtttcaaagttcacctttgtaccgaca

SEQ ID NO: 2045 - RNA, 100 nt, synthetic construct
  source 1..100: mol_type = other RNA
tcacctccccctaaccgtacccgccagcgccctcttcctgccggtcgaactcctggcggagcttagccacgctgtttcaaagttcacctttgtaccgaca

SEQ ID NO: 2046 - RNA, 100 nt, synthetic construct
  source 1..100: mol_type = other RNA
tccttgaccccaaggagtacgtgggagcgtgtttcaacatcacttcgaactcctggcggagcttagccacgctgtttcttctggcacctgtttgtcgaca

SEQ ID NO: 2047 - RNA, 100 nt, synthetic construct
  source 1..100: mol_type = other RNA
tccttgaccccaaggagtacgtgggagcgtgtttcaacatcacttcgaactcctggcggagcttagccacgctgtttcttctggcacctgatagtcgaca

SEQ ID NO: 2048 - RNA, 100 nt, synthetic construct
  source 1..100: mol_type = other RNA
tcctacgccccaaggggtacgtaaaagcgtgtttcaacatcacttcgaactcctggcggtgctaagccacgctgtttccgccggcacctgtgtgtcgaca

SEQ ID NO: 2049 - RNA, 100 nt, synthetic construct
  source 1..100: mol_type = other RNA
tcctacgccccaaggggtacgtaaaagcgtgtttcaacatcacttcgaactcctggcggtgctaagccacgctgtttccgccggcacctgatagtcgaca

SEQ ID NO: 2050 - RNA, 100 nt, synthetic construct
  source 1..100: mol_type = other RNA
tcgactcccccccgccgtactagccagcgacctcttcctgttcgtcgaagtcctggcggggttcagccacgcttgttcaaagttcacctttcaaacgaca

SEQ ID NO: 2051 - RNA, 100 nt, synthetic construct
  source 1..100: mol_type = other RNA
tcctagaccccaagaggtacgtgggagcgtgtttcaacatcacttcgaagtcctggcggggttcagccacgcttgttctatccacacctgcttgtcgaca

SEQ ID NO: 2052 - RNA, 100 nt, synthetic construct
  source 1..100: mol_type = other RNA
tcctagaccccaagaggtacgtgggagcgtgtttcaacatcacttcgaagtcctggcggggttcagccacgcttgttctatccacacctgatagtcgaca

SEQ ID NO: 2053 - RNA, 100 nt, synthetic construct
  source 1..100: mol_type = other RNA
tcgcatccccctaaccgtacctaccagcgctttcttcctacccctcgaattcctggcgcggttcagccacgctgattcaaagttcacctttcacacgaca

SEQ ID NO: 2054 - RNA, 100 nt, synthetic construct
  source 1..100: mol_type = other RNA
tcctcggccccaaaaagtacgtaagagcgtgtttcaacatcacttcgaattcctggcgcggttcagccacgctgattctctaagcacctgttcgtcgaca

SEQ ID NO: 2055 - RNA, 100 nt, synthetic construct
  source 1..100: mol_type = other RNA
tcctcggccccaaaaagtacgtaagagcgtgtttcaacatcacttcgaattcctggcgcggttcagccacgctgattctctaagcacctgatagtcgaca

SEQ ID NO: 2056 - RNA, 100 nt, synthetic construct
  source 1..100: mol_type = other RNA
tcggttcccccctgccgtacaaaccagcggtctcttcccctgtatcgaactgctggcggggttcagtcacgctgtttcaaaattcacctagcttccgaca

SEQ ID NO: 2057 - RNA, 100 nt, synthetic construct
  source 1..100: mol_type = other RNA
tccttggccccaaggggtacgtggaagcgtgtttcaacatcacttcgaactgctggcggggttcagtcacgctgtttcctttcccacctgatagtcgaca

SEQ ID NO: 2058 - RNA, 100 nt, synthetic construct
  source 1..100: mol_type = other RNA
tcggatcccccccaccgtacaaaccagcgccctcttcctgcgggtcgaactcctggcggggttcagccacgcttgtgcaaagttcaccttcgaaacgaca

SEQ ID NO: 2059 - RNA, 100 nt, synthetic construct
  source 1..100: mol_type = other RNA
tcgaatccccctcgccgtacccgccagcgccttcttcctgtggatcgaactcctggcggggggcagtcacgctgattcaaagttcacctaccacccgaca

SEQ ID NO: 2060 - RNA, 100 nt, synthetic construct
  source 1..100: mol_type = other RNA
tcctacgccccaagaggtacgtaagagcgtgtttcaacatcacttcgaactcctggcggggggcagtcacgctgattcctacggcacctgatagtcgaca

SEQ ID NO: 2061 - RNA, 100 nt, synthetic construct
  source 1..100: mol_type = other RNA
tcgattccccccaaccgtacacaccagcgaattcttcccgattctcgaacccctggcgggcctcagccacgctgtttcaaagttcacctcccccccgaca

SEQ ID NO: 2062 - RNA, 100 nt, synthetic construct
  source 1..100: mol_type = other RNA
tcgcatccccctaaccgtacataccagcgccttcttcctgttggtcgaactccaggcggggttcagccacgcttgtacaaagttcacctcaaccccgaca

SEQ ID NO: 2063 - RNA, 100 nt, synthetic construct
  source 1..100: mol_type = other RNA
tcatttccccctcaccgtactgaccagcgctttcttccctgtgatcgaacccctggcgtagctcagccacgcttgtccaaagttcacctaaccaccgaca

SEQ ID NO: 2064 - RNA, 100 nt, synthetic construct
  source 1..100: mol_type = other RNA
tcctaggccccaaagggtacgtgggagcgtgtttcaacatcacttcgaacccctggcgtagctcagccacgcttgtcctctatgcacctgatagtcgaca

SEQ ID NO: 2065 - RNA, 100 nt, synthetic construct
  source 1..100: mol_type = other RNA
tcctgtcccccaacccgtacgtcccagcgtgatcttcctacgagtcgaagtcctggccgggttcagccacgctgcttcaaagttcaccttgcctccgaca

SEQ ID NO: 2066 - RNA, 100 nt, synthetic construct
  source 1..100: mol_type = other RNA
tcaactcccccccaccgtaccggccagcgatctcttcctacgagtcgaagtcctggccgggttcagccacgctgcttcaaagttcaccttgcctccgaca

SEQ ID NO: 2067 - RNA, 100 nt, synthetic construct
  source 1..100: mol_type = other RNA
tcctgtcccccaacccgtacgtcccagcgtgtttcaacatcacttcgaagtcctggccgggttcagccacgctgcttccccccgcacctgatagtcgaca

SEQ ID NO: 2068 - RNA, 100 nt, synthetic construct
  source 1..100: mol_type = other RNA
tcctcgaccccaaaaggtacgtaaaagcgtgtttcaacatcacttcgaagtcctggccgggttcagccacgctgcttccccccgcacctgttcgtcgaca

SEQ ID NO: 2069 - RNA, 100 nt, synthetic construct
  source 1..100: mol_type = other RNA
tcctcgaccccaaaaggtacgtaaaagcgtgtttcaacatcacttcgaagtcctggccgggttcagccacgctgcttccccccgcacctgatagtcgaca

SEQ ID NO: 2070 - RNA, 100 nt, synthetic construct
  source 1..100: mol_type = other RNA
tcctgtcccccaacccgtacgtcccagcgtgtttcaacatcacttcgaactgctggcgtggctcagctacgctgattcttcaggcacctgatagtcgaca

SEQ ID NO: 2071 - RNA, 100 nt, synthetic construct
  source 1..100: mol_type = other RNA
tcctctaccccaaggagtacgtaagagcgtgtttcaacatcacttcgaactgctggcgtggctcagctacgctgattcttcaggcacctgtatgtcgaca

SEQ ID NO: 2072 - RNA, 100 nt, synthetic construct
  source 1..100: mol_type = other RNA
tcctctaccccaaggagtacgtaagagcgtgtttcaacatcacttcgaactgctggcgtggctcagctacgctgattcttcaggcacctgatagtcgaca

SEQ ID NO: 2073 - RNA, 100 nt, synthetic construct
  source 1..100: mol_type = other RNA
tcgaatcccccttgccgtactagccagcgcattcttcccggccgtcgaactcctggcggggcttagctacgctgcttcaaagttcacctccagaacgaca

SEQ ID NO: 2074 - RNA, 100 nt, synthetic construct
  source 1..100: mol_type = other RNA
tccttagccccaaagagtacgtaagagcgtgtttcaacatcacttcgaactcctggcggggcttagctacgctgcttccctcgacacctgcttgtcgaca

SEQ ID NO: 2075 - RNA, 100 nt, synthetic construct
  source 1..100: mol_type = other RNA
tccttagccccaaagagtacgtaagagcgtgtttcaacatcacttcgaactcctggcggggcttagctacgctgcttccctcgacacctgatagtcgaca

SEQ ID NO: 2076 - RNA, 100 nt, synthetic construct
  source 1..100: mol_type = other RNA
tcctgtcccccaacccgtacgtcccagcgtgatcttccccggagtcgaattcctggcggagctcagccacgctgattcaaagttcacctcgctcccgaca

SEQ ID NO: 2077 - RNA, 100 nt, synthetic construct
  source 1..100: mol_type = other RNA
tcagatcccccttaccgtaccgaccagcggcctcttccccggagtcgaattcctggcggagctcagccacgctgattcaaagttcacctcgctcccgaca

SEQ ID NO: 2078 - RNA, 100 nt, synthetic construct
  source 1..100: mol_type = other RNA
tcctgtcccccaacccgtacgtcccagcgtgtttcaacatcacttcgaattcctggcggagctcagccacgctgattccttcggcacctgatagtcgaca

SEQ ID NO: 2079 - RNA, 100 nt, synthetic construct
  source 1..100: mol_type = other RNA
tccttggccccaaggagtacgtaagagcgtgtttcaacatcacttcgaattcctggcggagctcagccacgctgattccttcggcacctgctcgtcgaca

SEQ ID NO: 2080 - RNA, 100 nt, synthetic construct
  source 1..100: mol_type = other RNA
tccttggccccaaggagtacgtaagagcgtgtttcaacatcacttcgaattcctggcggagctcagccacgctgattccttcggcacctgatagtcgaca

SEQ ID NO: 2081 - RNA, 100 nt, synthetic construct
  source 1..100: mol_type = other RNA
tcctgtcccccaacccgtacgtcccagcgtgatcttccctagagtcgaactcctggcggagctcagccacgcttgttcaaagttcaccttcaccgcgaca

SEQ ID NO: 2082 - RNA, 100 nt, synthetic construct
  source 1..100: mol_type = other RNA
tcatttccccctaaccgtacccaccagcgctctcttccctagagtcgaactcctggcggagctcagccacgcttgttcaaagttcaccttcaccgcgaca

SEQ ID NO: 2083 - RNA, 100 nt, synthetic construct
  source 1..100: mol_type = other RNA
tcctaggccccaagaggtacgtgggagcgtgtttcaacatcacttcgaactcctggcggagctcagccacgcttgttccgtacacacctgctcgtcgaca

SEQ ID NO: 2084 - RNA, 100 nt, synthetic construct
  source 1..100: mol_type = other RNA
tcctaggccccaagaggtacgtgggagcgtgtttcaacatcacttcgaactcctggcggagctcagccacgcttgttccgtacacacctgatagtcgaca

SEQ ID NO: 2085 - RNA, 100 nt, synthetic construct
  source 1..100: mol_type = other RNA
tcgcctccccctcgccgtacctaccagcggcctcttcccctttgtcgaactcctggcgggggttagccacgctggttccaagttcaccttctctgcgaca

SEQ ID NO: 2086 - RNA, 100 nt, synthetic construct
  source 1..100: mol_type = other RNA
tcctataccccaaggagtacgtaaaagcgtgtttcaacatcacttcgaactcctggcgggggttagccacgctggttccggccccacctgtacgtcgaca

SEQ ID NO: 2087 - RNA, 100 nt, synthetic construct
  source 1..100: mol_type = other RNA
tcctataccccaaggagtacgtaaaagcgtgtttcaacatcacttcgaactcctggcgggggttagccacgctggttccggccccacctgatagtcgaca

SEQ ID NO: 2088 - RNA, 100 nt, synthetic construct
  source 1..100: mol_type = other RNA
tcctgtcccccaacccgtacgtcccagcgtgatcttcccaaggatcgaactcctgacgggactccgccacgctgattcaaagttcacctaaggcgcgaca

SEQ ID NO: 2089 - RNA, 100 nt, synthetic construct
  source 1..100: mol_type = other RNA
tcgattccccctaaccgtactagccagcgacctcttcccaaggatcgaactcctgacgggactccgccacgctgattcaaagttcacctaaggcgcgaca

SEQ ID NO: 2090 - RNA, 100 nt, synthetic construct
  source 1..100: mol_type = other RNA
tcctcagccccaaaaagtacgtagaagcgtgtttcaacatcacttcgaactcctgacgggactccgccacgctgattctggctgcacctgcgtgtcgaca

SEQ ID NO: 2091 - RNA, 100 nt, synthetic construct
  source 1..100: mol_type = other RNA
tcctcagccccaaaaagtacgtagaagcgtgtttcaacatcacttcgaactcctgacgggactccgccacgctgattctggctgcacctgatagtcgaca

SEQ ID NO: 2092 - RNA, 100 nt, synthetic construct
  source 1..100: mol_type = other RNA
tcctccaccccaaacagtacgtgagagcgtgtttcaacatcacttcgaactcctggcggggcttagccacgctgattcctgcagcacctgtccgtcgaca

SEQ ID NO: 2093 - RNA, 100 nt, synthetic construct
  source 1..100: mol_type = other RNA
tcctccaccccaaacagtacgtgagagcgtgtttcaacatcacttcgaactcctggcggggcttagccacgctgattcctgcagcacctgatagtcgaca

SEQ ID NO: 2094 - RNA, 100 nt, synthetic construct
  source 1..100: mol_type = other RNA
tcggatcccccttgccgtactaaccagcgacctcttccccaggatcgaattcctggcgggtctaagccacgctggtccaaagttcacctaaattacgaca

SEQ ID NO: 2095 - RNA, 100 nt, synthetic construct
  source 1..100: mol_type = other RNA
tcctgtcaggcaaccctatcgtcccctggtgatcctggtgcacttcgaattcctggcgggtctaagccacgctggactctcgttcacagaatagtcgaca

SEQ ID NO: 2096 - RNA, 100 nt, synthetic construct
  source 1..100: mol_type = other RNA
tcctgtcaggcaaccctatcgtcccctggtgatcctggtgcacttcgaattcctggcgggtctaagccacgctggactctcgttcacctgatagtcgaca

SEQ ID NO: 2097 - RNA, 100 nt, synthetic construct
  source 1..100: mol_type = other RNA
tcctataccccaaggggtacgtaggagcgtgtttcaacatcacttcgaattcctggcgggtctaagccacgctggtcctccgcacacctgtttgtcgaca

SEQ ID NO: 2098 - RNA, 100 nt, synthetic construct
  source 1..100: mol_type = other RNA
tcctataccccaaggggtacgtaggagcgtgtttcaacatcacttcgaattcctggcgggtctaagccacgctggtcctccgcacacctgatagtcgaca

SEQ ID NO: 2099 - RNA, 100 nt, synthetic construct
  source 1..100: mol_type = other RNA
tcgattcccccccgccgtactggccagcgccctcttcctaccgatcgaacttctggtggggctcagccacgctggtccaaagctcacctcgccgacgaca

SEQ ID NO: 2100 - RNA, 100 nt, synthetic construct
  source 1..100: mol_type = other RNA
tcctgtcaagcaacccctccgtccctaagtgatccgtaagcacttcgaacttctggtggggctcagccacgctgggctcctgttcacggtatagtcgaca

SEQ ID NO: 2101 - RNA, 100 nt, synthetic construct
  source 1..100: mol_type = other RNA
tcctgtcaagcaacccctccgtccctaagtgatccgtaagcacttcgaacttctggtggggctcagccacgctgggctcctgttcacctgatagtcgaca

SEQ ID NO: 2102 - RNA, 100 nt, synthetic construct
  source 1..100: mol_type = other RNA
tcctttaccccaaagggtacgtgaaagcgtgtttcaacatcacttcgaacttctggtggggctcagccacgctggtccttgacccacctgcacgtcgaca

SEQ ID NO: 2103 - RNA, 100 nt, synthetic construct
  source 1..100: mol_type = other RNA
tcctttaccccaaagggtacgtgaaagcgtgtttcaacatcacttcgaacttctggtggggctcagccacgctggtccttgacccacctgatagtcgaca

SEQ ID NO: 2104 - RNA, 100 nt, synthetic construct
  source 1..100: mol_type = other RNA
tcggttcccccttaccgtactagccagcgctctcttcctggaaatcgaactcctggcgggcctcagccacgctgctccaaagttcacctcacatccgaca

SEQ ID NO: 2105 - RNA, 100 nt, synthetic construct
  source 1..100: mol_type = other RNA
tcatctcccccccaccgtactagccagcgggttcttcctgtttatcgaactcctggcggggattagccacgctgattcaaagttcacctttataccgaca

SEQ ID NO: 2106 - RNA, 100 nt, synthetic construct
  source 1..100: mol_type = other RNA
tcctacaccccaaggggtacgtaagagcgtgtttcaacatcacttcgaactcctggcggggattagccacgctgattctatacgcacctgcttgtcgaca

SEQ ID NO: 2107 - RNA, 100 nt, synthetic construct
  source 1..100: mol_type = other RNA
tcctacaccccaaggggtacgtaagagcgtgtttcaacatcacttcgaactcctggcggggattagccacgctgattctatacgcacctgatagtcgaca

SEQ ID NO: 2108 - RNA, 100 nt, synthetic construct
  source 1..100: mol_type = other RNA
tcgattcccccttaccgtactaaccagcgcattcttcccaagaatcgaacttctggcgggtctcagccacgctcgttcaaagttcacctccaccacgaca

SEQ ID NO: 2109 - RNA, 100 nt, synthetic construct
  source 1..100: mol_type = other RNA
tcctacgccccaaacagtacgtggaagcgtgtttcaacatcacttcgaacttctggcgggtctcagccacgctcgttcctcaaccacctgttcgtcgaca

SEQ ID NO: 2110 - RNA, 100 nt, synthetic construct
  source 1..100: mol_type = other RNA
tcctacgccccaaacagtacgtggaagcgtgtttcaacatcacttcgaacttctggcgggtctcagccacgctcgttcctcaaccacctgatagtcgaca

SEQ ID NO: 2111 - RNA, 100 nt, synthetic construct
  source 1..100: mol_type = other RNA
tcgaatcccccccgccgtactagccagcgaattcttcctgtgaatcgaattcctggcggtgctcagccacgctggtacaaagttcacctcctcaacgaca

SEQ ID NO: 2112 - RNA, 100 nt, synthetic construct
  source 1..100: mol_type = other RNA
tcctgtcaaacaacccttccgtccctcagtgatcgctttccacttcgaattcctggcggtgctcagccacgctggccgcacgttcacaatatagtcgaca

SEQ ID NO: 2113 - RNA, 100 nt, synthetic construct
  source 1..100: mol_type = other RNA
tcctgtcaaacaacccttccgtccctcagtgatcgctttccacttcgaattcctggcggtgctcagccacgctggccgcacgttcacctgatagtcgaca

SEQ ID NO: 2114 - RNA, 100 nt, synthetic construct
  source 1..100: mol_type = other RNA
tcctttaccccaagaggtacgtaggagcgtgtttcaacatcacttcgaattcctggcggtgctcagccacgctggtactcgcgacacctgcatgtcgaca

SEQ ID NO: 2115 - RNA, 100 nt, synthetic construct
  source 1..100: mol_type = other RNA
tcctttaccccaagaggtacgtaggagcgtgtttcaacatcacttcgaattcctggcggtgctcagccacgctggtactcgcgacacctgatagtcgaca

SEQ ID NO: 2116 - RNA, 100 nt, synthetic construct
  source 1..100: mol_type = other RNA
tcatctccccctcaccgtacacgccagcgctctcttcctttgtatcgcactcctggcgggtgtcagccacgctggtgcaaagttcaccttcggcgcgaca

SEQ ID NO: 2117 - RNA, 100 nt, synthetic construct
  source 1..100: mol_type = other RNA
tcctgtcacacaacccctccgtccctcagtgatcacactgcacttcgcactcctggcgggtgtcagccacgctggcgtcccgttcacaatatagtcgaca

SEQ ID NO: 2118 - RNA, 100 nt, synthetic construct
  source 1..100: mol_type = other RNA
tcctgtcacacaacccctccgtccctcagtgatcacactgcacttcgcactcctggcgggtgtcagccacgctggcgtcccgttcacctgatagtcgaca

SEQ ID NO: 2119 - RNA, 100 nt, synthetic construct
  source 1..100: mol_type = other RNA
tcggttcccccttaccgtaccagccagcgaattcttccccccggtcgaacttctggcgggggtcagctacgctgttacaaagttcacctctccaccgaca

SEQ ID NO: 2120 - RNA, 100 nt, synthetic construct
  source 1..100: mol_type = other RNA
tcacctcccccccgccgtactgaccagcgggttcttcccagaggtcgaaatcctgacggggttaagccacgctgctacaaagttcaccttcgccgcgaca

SEQ ID NO: 2121 - RNA, 100 nt, synthetic construct
  source 1..100: mol_type = other RNA
tcacatccccccaaccgtacaggccagcgggttcttcccctttatcgaactcctggcggggcttagtcacgctggtgcaaagttcacctaactaccgaca

SEQ ID NO: 2122 - RNA, 100 nt, synthetic construct
  source 1..100: mol_type = other RNA
tcctgtcgaacaacccctccgtcccccggtgatcgattggcacttcgaactcctggcggggcttagtcacgctgggcttgtgttcacaaaatagtcgaca

SEQ ID NO: 2123 - RNA, 100 nt, synthetic construct
  source 1..100: mol_type = other RNA
tcctgtcgaacaacccctccgtcccccggtgatcgattggcacttcgaactcctggcggggcttagtcacgctgggcttgtgttcacctgatagtcgaca

SEQ ID NO: 2124 - RNA, 100 nt, synthetic construct
  source 1..100: mol_type = other RNA
tcctgtcccccaacccgtacgtcccagcgtgatcttcccatgtgtcgaagtcctgacggggctcagccacgcttgttcaaagttcaccttacgaacgaca

SEQ ID NO: 2125 - RNA, 100 nt, synthetic construct
  source 1..100: mol_type = other RNA
tcggctcccccccaccgtacctaccagcgctctcttcccatgtgtcgaagtcctgacggggctcagccacgcttgttcaaagttcaccttacgaacgaca

SEQ ID NO: 2126 - RNA, 100 nt, synthetic construct
  source 1..100: mol_type = other RNA
tcctacaccccaaggagtacgtgggagcgtgtttcaacatcacttcgaagtcctgacggggctcagccacgcttgttcttctaccacctgctcgtcgaca

SEQ ID NO: 2127 - RNA, 100 nt, synthetic construct
  source 1..100: mol_type = other RNA
tcctacaccccaaggagtacgtgggagcgtgtttcaacatcacttcgaagtcctgacggggctcagccacgcttgttcttctaccacctgatagtcgaca

SEQ ID NO: 2128 - RNA, 100 nt, synthetic construct
  source 1..100: mol_type = other RNA
tcgactccccctcgccgtaccagccagcggtctcttccctatagtcgaactcctgacggagctcagccacgctggatcaaagttcaccttactaccgaca

SEQ ID NO: 2129 - RNA, 100 nt, synthetic construct
  source 1..100: mol_type = other RNA
tcctgtcaagcaaccccttcgtcccctagtgatcgaattccacttcgaactcctgacggagctcagccacgctgggattgtgttcacataatagtcgaca

SEQ ID NO: 2130 - RNA, 100 nt, synthetic construct
  source 1..100: mol_type = other RNA
tcctgtcaagcaaccccttcgtcccctagtgatcgaattccacttcgaactcctgacggagctcagccacgctgggattgtgttcacctgatagtcgaca

SEQ ID NO: 2131 - RNA, 100 nt, synthetic construct
  source 1..100: mol_type = other RNA
tcctttaccccaaggggtacgtggaagcgtgtttcaacatcacttcgaactcctgacggagctcagccacgctggatctaacgccacctgcttgtcgaca

SEQ ID NO: 2132 - RNA, 100 nt, synthetic construct
  source 1..100: mol_type = other RNA
tcctttaccccaaggggtacgtggaagcgtgtttcaacatcacttcgaactcctgacggagctcagccacgctggatctaacgccacctgatagtcgaca

SEQ ID NO: 2133 - RNA, 100 nt, synthetic construct
  source 1..100: mol_type = other RNA
tcctgtcccccaacccgtacgtcccagcgtgatcttcctacgggtcgaactcctggcggtgttcagccacgcttgttcaaagttcatctcctccccgaca

SEQ ID NO: 2134 - RNA, 100 nt, synthetic construct
  source 1..100: mol_type = other RNA
tcatttcccccttgccgtactagccagcgccttcttcctacgggtcgaactcctggcggtgttcagccacgcttgttcaaagttcatctcctccccgaca

SEQ ID NO: 2135 - RNA, 100 nt, synthetic construct
  source 1..100: mol_type = other RNA
tcctcggccccaaggggtacgtagaagcgtgtttcaacatcacttcgaactcctggcggtgttcagccacgcttgttctcacgccacctgtatgtcgaca

SEQ ID NO: 2136 - RNA, 100 nt, synthetic construct
  source 1..100: mol_type = other RNA
tcctcggccccaaggggtacgtagaagcgtgtttcaacatcacttcgaactcctggcggtgttcagccacgcttgttctcacgccacctgatagtcgaca

SEQ ID NO: 2137 - RNA, 100 nt, synthetic construct
  source 1..100: mol_type = other RNA
tccatccccccatggcgtacggagcagcgtaaacttccacgtgagcgaactcctggcgggggagagccacgctggttcatgtcgaacctgatagtcgaca

SEQ ID NO: 2138 - RNA, 100 nt, synthetic construct
  source 1..100: mol_type = other RNA
tcctgtcccgatacccgtctttcccagatagatcttattggtcttcgaactcctggcgggggagagccacgctggttcatcgcggacctgagcttcgaca

SEQ ID NO: 2139 - RNA, 100 nt, synthetic construct
  source 1..100: mol_type = other RNA
tcctgtcccgatacccgtctttcccagatagatcttattggtcttcgaactcctggcgggggagagccacgctggttcatcgcggacctgatagtcgaca

SEQ ID NO: 2140 - RNA, 100 nt, synthetic construct
  source 1..100: mol_type = other RNA
tcctgtccgaaaacccggtagtcccaaattgatctgatcgaacttcgaactcctggcgggggagagccacgctggttcatttgggacctgaacttcgaca

SEQ ID NO: 2141 - RNA, 100 nt, synthetic construct
  source 1..100: mol_type = other RNA
tcctgtccgaaaacccggtagtcccaaattgatctgatcgaacttcgaactcctggcgggggagagccacgctggttcatttgggacctgatagtcgaca

SEQ ID NO: 2142 - RNA, 100 nt, synthetic construct
  source 1..100: mol_type = other RNA
tcctgtcggacaaccccgccgtcccctggtgatcgcttggcacttcgaactcctggcgggggagagccacgctggttcatcagaaacctgactctcgaca

SEQ ID NO: 2143 - RNA, 100 nt, synthetic construct
  source 1..100: mol_type = other RNA
tcctgtcggacaaccccgccgtcccctggtgatcgcttggcacttcgaactcctggcgggggagagccacgctggttcatcagaaacctgatagtcgaca

SEQ ID NO: 2144 - RNA, 100 nt, synthetic construct
  source 1..100: mol_type = other RNA
tcctgtgaaccaaccatcacgtccgtccgtgatgggggctcacttcgaactcctggcgggggagagccacgctggttcatgaaaaacctgactttcgaca

SEQ ID NO: 2145 - RNA, 100 nt, synthetic construct
  source 1..100: mol_type = other RNA
tcctgtgaaccaaccatcacgtccgtccgtgatgggggctcacttcgaactcctggcgggggagagccacgctggttcatgaaaaacctgatagtcgaca

SEQ ID NO: 2146 - RNA, 100 nt, synthetic construct
  source 1..100: mol_type = other RNA
tcctggaacccaacgattacgtcagcgcgtgaggcaggatcacttcgaactcctggcgggggagagccacgctggttcactaccgacctgaccatcgaca

SEQ ID NO: 2147 - RNA, 100 nt, synthetic construct
  source 1..100: mol_type = other RNA
tcctggaacccaacgattacgtcagcgcgtgaggcaggatcacttcgaactcctggcgggggagagccacgctggttcactaccgacctgatagtcgaca

SEQ ID NO: 2148 - RNA, 100 nt, synthetic construct
  source 1..100: mol_type = other RNA
tcctagaccccaaagagtacgtggaagcgtgtgggaacatcacttcgaactcctggcgggggagagccacgctggttcactaaagacctgaatctcgaca

SEQ ID NO: 2149 - RNA, 100 nt, synthetic construct
  source 1..100: mol_type = other RNA
tcctagaccccaaagagtacgtggaagcgtgtgggaacatcacttcgaactcctggcgggggagagccacgctggttcactaaagacctgatagtcgaca

SEQ ID NO: 2150 - RNA, 100 nt, synthetic construct
  source 1..100: mol_type = other RNA
tccccacccccatgacgtacgacacagcgtttggccccatcacttcgaactcctggcgggggagagccacgctggttcacctggaacctgactctcgaca

SEQ ID NO: 2151 - RNA, 100 nt, synthetic construct
  source 1..100: mol_type = other RNA
tccccacccccatgacgtacgacacagcgtttggccccatcacttcgaactcctggcgggggagagccacgctggttcacctggaacctgatagtcgaca

SEQ ID NO: 2152 - RNA, 100 nt, synthetic construct
  source 1..100: mol_type = other RNA
tcggatcccccctgccgtactgaccagcggtgcactccatcacttcgaactcctggcgggggagagccacgctggttcattcataacctgagattcgaca

SEQ ID NO: 2153 - RNA, 100 nt, synthetic construct
  source 1..100: mol_type = other RNA
tcggatcccccctgccgtactgaccagcggtgcactccatcacttcgaactcctggcgggggagagccacgctggttcattcataacctgatagtcgaca

SEQ ID NO: 2154 - RNA, 100 nt, synthetic construct
  source 1..100: mol_type = other RNA
tcctgtcccgacacccgtcaatcccagaagttacttccatcacttcgaactcctggcgggggagagccacgctggttcacccctaacctgagtatcgaca

SEQ ID NO: 2155 - RNA, 100 nt, synthetic construct
  source 1..100: mol_type = other RNA
tcctgtcccgacacccgtcaatcccagaagttacttccatcacttcgaactcctggcgggggagagccacgctggttcacccctaacctgatagtcgaca

SEQ ID NO: 2156 - RNA, 100 nt, synthetic construct
  source 1..100: mol_type = other RNA
tcctgtcgagcaacccattcgtccctattccatcttccatcacttcgaactcctggcgggggagagccacgctggttcatgaaagacctgagtctcgaca

SEQ ID NO: 2157 - RNA, 100 nt, synthetic construct
  source 1..100: mol_type = other RNA
tcctgtcgagcaacccattcgtccctattccatcttccatcacttcgaactcctggcgggggagagccacgctggttcatgaaagacctgatagtcgaca

SEQ ID NO: 2158 - RNA, 100 nt, synthetic construct
  source 1..100: mol_type = other RNA
tcctgtcccccaacccgtacgtcccagcgtgatcttccactgaagcgaactcctggcgggggagagccacgctggttcaattaaatcctgatagtcgaca

SEQ ID NO: 2159 - RNA, 100 nt, synthetic construct
  source 1..100: mol_type = other RNA
tccccacccccacgacgtacgacacagcgtccacttccactgaagcgaactcctggcgggggagagccacgctggttcaattaaatcctgatagtcgaca

SEQ ID NO: 2160 - RNA, 100 nt, synthetic construct
  source 1..100: mol_type = other RNA
tcgcctccccctcgccgtactagccagcgatctcttcctatggatcgaactcctggcgggggagagccacgctggttcaataataccctgatcaacgaca

SEQ ID NO: 2161 - RNA, 100 nt, synthetic construct
  source 1..100: mol_type = other RNA
tcgcctccccctcgccgtactagccagcgatctcttcctatggatcgaactcctggcgggggagagccacgctggttcaataataccctgatagtcgaca

SEQ ID NO: 2162 - RNA, 100 nt, synthetic construct
  source 1..100: mol_type = other RNA
tcctgtcccgacacccgtcaatcccagaccgatcttgaagaccttcgaactcctggcgggggagagccacgctggttcaataaccccctgatcaacgaca

SEQ ID NO: 2163 - RNA, 100 nt, synthetic construct
  source 1..100: mol_type = other RNA
tcctgtcccgacacccgtcaatcccagaccgatcttgaagaccttcgaactcctggcgggggagagccacgctggttcaataaccccctgatagtcgaca

SEQ ID NO: 2164 - RNA, 100 nt, synthetic construct
  source 1..100: mol_type = other RNA
tcctgtccagaaacccggcagtcccacattgatctcagtgaacttcgaactcctggcgggggagagccacgctggttcaacatcctcctgatttccgaca

SEQ ID NO: 2165 - RNA, 100 nt, synthetic construct
  source 1..100: mol_type = other RNA
tcctgtccagaaacccggcagtcccacattgatctcagtgaacttcgaactcctggcgggggagagccacgctggttcaacatcctcctgatagtcgaca

SEQ ID NO: 2166 - RNA, 100 nt, synthetic construct
  source 1..100: mol_type = other RNA
tcctgtcgagcaaccctatcgtcccccagtgatcgaaagacacttcgaactcctggcgggggagagccacgctggttcaactatatcctgattcgcgaca

SEQ ID NO: 2167 - RNA, 100 nt, synthetic construct
  source 1..100: mol_type = other RNA
tcctgtcgagcaaccctatcgtcccccagtgatcgaaagacacttcgaactcctggcgggggagagccacgctggttcaactatatcctgatagtcgaca

SEQ ID NO: 2168 - RNA, 100 nt, synthetic construct
  source 1..100: mol_type = other RNA
tcctgtggaccaaccatgacgtccgctcgtgatgcaaactcacttcgaactcctggcgggggagagccacgctggttcaatacacccctgattcacgaca

SEQ ID NO: 2169 - RNA, 100 nt, synthetic construct
  source 1..100: mol_type = other RNA
tcctgtggaccaaccatgacgtccgctcgtgatgcaaactcacttcgaactcctggcgggggagagccacgctggttcaatacacccctgatagtcgaca

SEQ ID NO: 2170 - RNA, 100 nt, synthetic construct
  source 1..100: mol_type = other RNA
tcctggaacccaacaattacgtcgatgcgtgaagcagaatcacttcgaactcctggcgggggagagccacgctggttcaatgataccctgattcacgaca

SEQ ID NO: 2171 - RNA, 100 nt, synthetic construct
  source 1..100: mol_type = other RNA
tcctggaacccaacaattacgtcgatgcgtgaagcagaatcacttcgaactcctggcgggggagagccacgctggttcaatgataccctgatagtcgaca

SEQ ID NO: 2172 - RNA, 100 nt, synthetic construct
  source 1..100: mol_type = other RNA
tcctagaccccaaagggtacgtgggagcgtgcgagagcatcacttcgaactcctggcgggggagagccacgctggttcaacacgttcctgattcgcgaca

SEQ ID NO: 2173 - RNA, 100 nt, synthetic construct
  source 1..100: mol_type = other RNA
tcctagaccccaaagggtacgtgggagcgtgcgagagcatcacttcgaactcctggcgggggagagccacgctggttcaacacgttcctgatagtcgaca

SEQ ID NO: 2174 - RNA, 100 nt, synthetic construct
  source 1..100: mol_type = other RNA
tcccagcccccacagcgtacgaggcagcgtcccgggccatcacttcgaactcctggcgggggagagccacgctggttcaattgggtcctgatcaccgaca

SEQ ID NO: 2175 - RNA, 100 nt, synthetic construct
  source 1..100: mol_type = other RNA
tcccagcccccacagcgtacgaggcagcgtcccgggccatcacttcgaactcctggcgggggagagccacgctggttcaattgggtcctgatagtcgaca

SEQ ID NO: 2176 - RNA, 100 nt, synthetic construct
  source 1..100: mol_type = other RNA
tcagttccccctcgccgtacccgccagcgggcgtgtccatcacttcgaactcctggcgggggagagccacgctggttcaattagatcctgattcacgaca

SEQ ID NO: 2177 - RNA, 100 nt, synthetic construct
  source 1..100: mol_type = other RNA
tcagttccccctcgccgtacccgccagcgggcgtgtccatcacttcgaactcctggcgggggagagccacgctggttcaattagatcctgatagtcgaca

SEQ ID NO: 2178 - RNA, 100 nt, synthetic construct
  source 1..100: mol_type = other RNA
tcctgtcccaacacccgtttttcccagatctcacttccatcacttcgaactcctggcgggggagagccacgctggttcaatcggatcctgattaacgaca

SEQ ID NO: 2179 - RNA, 100 nt, synthetic construct
  source 1..100: mol_type = other RNA
tcctgtcccaacacccgtttttcccagatctcacttccatcacttcgaactcctggcgggggagagccacgctggttcaatcggatcctgatagtcgaca

SEQ ID NO: 2180 - RNA, 100 nt, synthetic construct
  source 1..100: mol_type = other RNA
tcctgtccgaaaacccgctagtcccaccaagttcttccatcacttcgaactcctggcgggggagagccacgctggttcaacctggtcctgatttccgaca

SEQ ID NO: 2181 - RNA, 100 nt, synthetic construct
  source 1..100: mol_type = other RNA
tcctgtccgaaaacccgctagtcccaccaagttcttccatcacttcgaactcctggcgggggagagccacgctggttcaacctggtcctgatagtcgaca

SEQ ID NO: 2182 - RNA, 100 nt, synthetic construct
  source 1..100: mol_type = other RNA
tcctgtcagacaacccattcgtccccctttcatcttccatcacttcgaactcctggcgggggagagccacgctggttcaatatcttcctgatccacgaca

SEQ ID NO: 2183 - RNA, 100 nt, synthetic construct
  source 1..100: mol_type = other RNA
tcctgtcagacaacccattcgtccccctttcatcttccatcacttcgaactcctggcgggggagagccacgctggttcaatatcttcctgatagtcgaca

SEQ ID NO: 2184 - RNA, 100 nt, synthetic construct
  source 1..100: mol_type = other RNA
tccacccccccatcacgtacgcaacagcgttcccttccaggcaaccgaactcctggcgggggagagccacgctggttcaaatctttgctgatacaagaca

SEQ ID NO: 2185 - RNA, 100 nt, synthetic construct
  source 1..100: mol_type = other RNA
tccacccccccatcacgtacgcaacagcgttcccttccaggcaaccgaactcctggcgggggagagccacgctggttcaaatctttgctgatagtcgaca

SEQ ID NO: 2186 - RNA, 100 nt, synthetic construct
  source 1..100: mol_type = other RNA
tcggatccccccaaccgtaccggccagcggcctcttcctgagtgtcgaactcctggcgggggagagccacgctggttcaaaatcttgctgataccagaca

SEQ ID NO: 2187 - RNA, 100 nt, synthetic construct
  source 1..100: mol_type = other RNA
tcggatccccccaaccgtaccggccagcggcctcttcctgagtgtcgaactcctggcgggggagagccacgctggttcaaaatcttgctgatagtcgaca

SEQ ID NO: 2188 - RNA, 100 nt, synthetic construct
  source 1..100: mol_type = other RNA
tcctgtcccggtacccgtcattcccagaaagatcttggcgatcttcgaactcctggcgggggagagccacgctggttcaaatatggactgatacaagaca

SEQ ID NO: 2189 - RNA, 100 nt, synthetic construct
  source 1..100: mol_type = other RNA
tcctgtcccggtacccgtcattcccagaaagatcttggcgatcttcgaactcctggcgggggagagccacgctggttcaaatatggactgatagtcgaca

SEQ ID NO: 2190 - RNA, 100 nt, synthetic construct
  source 1..100: mol_type = other RNA
tcctgtccaagaacccggaagtcccaatttgatctcaagggacttcgaactcctggcgggggagagccacgctggttcaaaaaggtgctgatattagaca

SEQ ID NO: 2191 - RNA, 100 nt, synthetic construct
  source 1..100: mol_type = other RNA
tcctgtccaagaacccggaagtcccaatttgatctcaagggacttcgaactcctggcgggggagagccacgctggttcaaaaaggtgctgatagtcgaca

SEQ ID NO: 2192 - RNA, 100 nt, synthetic construct
  source 1..100: mol_type = other RNA
tcctgtcacacaaccctatcgtccccaagtgatcgtagaacacttcgaactcctggcgggggagagccacgctggttcaaacaaatgctgatacaggaca

SEQ ID NO: 2193 - RNA, 100 nt, synthetic construct
  source 1..100: mol_type = other RNA
tcctgtcacacaaccctatcgtccccaagtgatcgtagaacacttcgaactcctggcgggggagagccacgctggttcaaacaaatgctgatagtcgaca

SEQ ID NO: 2194 - RNA, 100 nt, synthetic construct
  source 1..100: mol_type = other RNA
tcctgtaggccaaccataacgtccactcgtgatggcatttcacttcgaactcctggcgggggagagccacgctggttcaaatctatactgatacgggaca

SEQ ID NO: 2195 - RNA, 100 nt, synthetic construct
  source 1..100: mol_type = other RNA
tcctgtaggccaaccataacgtccactcgtgatggcatttcacttcgaactcctggcgggggagagccacgctggttcaaatctatactgatagtcgaca

SEQ ID NO: 2196 - RNA, 100 nt, synthetic construct
  source 1..100: mol_type = other RNA
tcctgaaacccaacatatacgtcagcgcgtgaaaaggaatcacttcgaactcctggcgggggagagccacgctggttcaaaccggtactgatacgggaca

SEQ ID NO: 2197 - RNA, 100 nt, synthetic construct
  source 1..100: mol_type = other RNA
tcctgaaacccaacatatacgtcagcgcgtgaaaaggaatcacttcgaactcctggcgggggagagccacgctggttcaaaccggtactgatagtcgaca

SEQ ID NO: 2198 - RNA, 100 nt, synthetic construct
  source 1..100: mol_type = other RNA
tccccgcccccatcacgtacggcacagcgtcccagaccatcacttcgaactcctggcgggggagagccacgctggttcaaacgaatgctgatatgggaca

SEQ ID NO: 2199 - RNA, 100 nt, synthetic construct
  source 1..100: mol_type = other RNA
tccccgcccccatcacgtacggcacagcgtcccagaccatcacttcgaactcctggcgggggagagccacgctggttcaaacgaatgctgatagtcgaca

SEQ ID NO: 2200 - RNA, 100 nt, synthetic construct
  source 1..100: mol_type = other RNA
tcggatccccctcgccgtacccgccagcgagcaaatccatcacttcgaactcctggcgggggagagccacgctggttcaaaaacccgctgataagggaca

SEQ ID NO: 2201 - RNA, 100 nt, synthetic construct
  source 1..100: mol_type = other RNA
tcggatccccctcgccgtacccgccagcgagcaaatccatcacttcgaactcctggcgggggagagccacgctggttcaaaaacccgctgatagtcgaca

SEQ ID NO: 2202 - RNA, 100 nt, synthetic construct
  source 1..100: mol_type = other RNA
tcctgtcccagcacccgtctatcccaggcactccttccatcacttcgaactcctggcgggggagagccacgctggttcaaactagtactgataacggaca

SEQ ID NO: 2203 - RNA, 100 nt, synthetic construct
  source 1..100: mol_type = other RNA
tcctgtcccagcacccgtctatcccaggcactccttccatcacttcgaactcctggcgggggagagccacgctggttcaaactagtactgatagtcgaca

SEQ ID NO: 2204 - RNA, 100 nt, synthetic construct
  source 1..100: mol_type = other RNA
tcctgtccagaaacccgctggtcccacacatctcttccatcacttcgaactcctggcgggggagagccacgctggttcaaaagcgtgctgatacgagaca

SEQ ID NO: 2205 - RNA, 100 nt, synthetic construct
  source 1..100: mol_type = other RNA
tcctgtccagaaacccgctggtcccacacatctcttccatcacttcgaactcctggcgggggagagccacgctggttcaaaagcgtgctgatagtcgaca

SEQ ID NO: 2206 - RNA, 100 nt, synthetic construct
  source 1..100: mol_type = other RNA
tcctgtcagacaaccccaccgtcccccaaatatcttccatcacttcgaactcctggcgggggagagccacgctggttcaaaagcaaactgatataggaca

SEQ ID NO: 2207 - RNA, 100 nt, synthetic construct
  source 1..100: mol_type = other RNA
tcctgtcagacaaccccaccgtcccccaaatatcttccatcacttcgaactcctggcgggggagagccacgctggttcaaaagcaaactgatagtcgaca

SEQ ID NO: 2208 - RNA, 100 nt, synthetic construct
  source 1..100: mol_type = other RNA
tcggatccccctcgccgtactagccagcgaactcttcccccccgtcgaactcctggcgggggagagccacgctggttcaaagctgtagtgatagggtaca

SEQ ID NO: 2209 - RNA, 100 nt, synthetic construct
  source 1..100: mol_type = other RNA
tcggatccccctcgccgtactagccagcgaactcttcccccccgtcgaactcctggcgggggagagccacgctggttcaaagctgtagtgatagtcgaca

SEQ ID NO: 2210 - RNA, 100 nt, synthetic construct
  source 1..100: mol_type = other RNA
tcctgtcccggtacccgtctctcccagaccgatcttagagaccttcgaactcctggcgggggagagccacgctggttcaaagggaaggtgataggataca

SEQ ID NO: 2211 - RNA, 100 nt, synthetic construct
  source 1..100: mol_type = other RNA
tcctgtcccggtacccgtctctcccagaccgatcttagagaccttcgaactcctggcgggggagagccacgctggttcaaagggaaggtgatagtcgaca

SEQ ID NO: 2212 - RNA, 100 nt, synthetic construct
  source 1..100: mol_type = other RNA
tcctgtcgagcaacccagccgtccctaagtgatcaaaaaacacttcgaactcctggcgggggagagccacgctggttcaaaggcgtggtgatagggtaca

SEQ ID NO: 2213 - RNA, 100 nt, synthetic construct
  source 1..100: mol_type = other RNA
tcctgtcgagcaacccagccgtccctaagtgatcaaaaaacacttcgaactcctggcgggggagagccacgctggttcaaaggcgtggtgatagtcgaca

SEQ ID NO: 2214 - RNA, 100 nt, synthetic construct
  source 1..100: mol_type = other RNA
tcctgtaaaccaaccgaaacgtccgtacgtgatggcaattcacttcgaactcctggcgggggagagccacgctggttcaaaggaggaatgataggttaca

SEQ ID NO: 2215 - RNA, 100 nt, synthetic construct
  source 1..100: mol_type = other RNA
tcctgtaaaccaaccgaaacgtccgtacgtgatggcaattcacttcgaactcctggcgggggagagccacgctggttcaaaggaggaatgatagtcgaca

SEQ ID NO: 2216 - RNA, 100 nt, synthetic construct
  source 1..100: mol_type = other RNA
tcctggcacccaacggttacgtcagcgcgtgagcgaggatcacttcgaactcctggcgggggagagccacgctggttcaaagccgtgatgataggataca

SEQ ID NO: 2217 - RNA, 100 nt, synthetic construct
  source 1..100: mol_type = other RNA
tcctggcacccaacggttacgtcagcgcgtgagcgaggatcacttcgaactcctggcgggggagagccacgctggttcaaagccgtgatgatagtcgaca

SEQ ID NO: 2218 - RNA, 100 nt, synthetic construct
  source 1..100: mol_type = other RNA
tcctacaccccaaagggtacgtaggagcgtgcgggcgcatcacttcgaactcctggcgggggagagccacgctggttcaaaggggagatgatagggaaca

SEQ ID NO: 2219 - RNA, 100 nt, synthetic construct
  source 1..100: mol_type = other RNA
tcctacaccccaaagggtacgtaggagcgtgcgggcgcatcacttcgaactcctggcgggggagagccacgctggttcaaaggggagatgatagtcgaca

SEQ ID NO: 2220 - RNA, 100 nt, synthetic construct
  source 1..100: mol_type = other RNA
tcccaccccccatgacgtacgatacagcgtacaggaccatcacttcgaactcctggcgggggagagccacgctggttcaaagggttaatgataggttaca

SEQ ID NO: 2221 - RNA, 100 nt, synthetic construct
  source 1..100: mol_type = other RNA
tcccaccccccatgacgtacgatacagcgtacaggaccatcacttcgaactcctggcgggggagagccacgctggttcaaagggttaatgatagtcgaca

SEQ ID NO: 2222 - RNA, 100 nt, synthetic construct
  source 1..100: mol_type = other RNA
tcctgtcccgatacccgtcaatcccagagcaggcttccatcacttcgaactcctggcgggggagagccacgctggttcaaagcatgagtgatagggtaca

SEQ ID NO: 2223 - RNA, 100 nt, synthetic construct
  source 1..100: mol_type = other RNA
tcctgtccggaaacccgcaagtcccaacctattcttccatcacttcgaactcctggcgggggagagccacgctggttcaaagctgcaatgatagtcgaca

SEQ ID NO: 2224 - RNA, 100 nt, synthetic construct
  source 1..100: mol_type = other RNA
tcctgtcaaacaacccctccgtcccctaattatcttccatcacttcgaactcctggcgggggagagccacgctggttcaaaggattcatgatagggtaca

SEQ ID NO: 2225 - RNA, 100 nt, synthetic construct
  source 1..100: mol_type = other RNA
tcctgtcaaacaacccctccgtcccctaattatcttccatcacttcgaactcctggcgggggagagccacgctggttcaaaggattcatgatagtcgaca

SEQ ID NO: 2226 - RNA, 100 nt, synthetic construct
  source 1..100: mol_type = other RNA
tcctgtccggaaacccgaaagtcccaaattgatctggggcgacttcgaactcctggcgggggagagccacgctagccacaagttcacctgatagtcgaca

SEQ ID NO: 2227 - RNA, 100 nt, synthetic construct
  source 1..100: mol_type = other RNA
tcctgcaacccaacaaatacgtcaacgcgtgaatatccatctgagaaaactcctggcgggggagagccacgctgcaaactagttcacctgatagtcgaca

SEQ ID NO: 2228 - RNA, 100 nt, synthetic construct
  source 1..100: mol_type = other RNA
tccttagccccaaagagtacgtagaagcgtgtagttccatataaaggaactcctggcgggggagagccacgctgcaagctagttcacctgatagtcgaca

SEQ ID NO: 2229 - RNA, 100 nt, synthetic construct
  source 1..100: mol_type = other RNA
tcccaacccccacaacgtacgcggcagcgtatacttccacgtgagcgaactcctggcgggggagagccacgctgtgccctagttcacctgatagtcgaca

SEQ ID NO: 2230 - RNA, 100 nt, synthetic construct
  source 1..100: mol_type = other RNA
tcaattcccccccgccgtaccggccagcgatttcttcctatgagtcgaactcctggcgggggagagccacgctgtgatttagttcaggggatagtcgaca

SEQ ID NO: 2231 - RNA, 100 nt, synthetic construct
  source 1..100: mol_type = other RNA
tcaattcccccccgccgtaccggccagcgatttcttcctatgagtcgaactcctggcgggggagagccacgctgtgatttagttcacctgatagtcgaca

SEQ ID NO: 2232 - RNA, 100 nt, synthetic construct
  source 1..100: mol_type = other RNA
tcctgtaggccaaccaacacgtccgtacgtgatgggggttcacttcgaactcctggcgggggagagccacgctgcaacctagttcaaaagatagtcgaca

SEQ ID NO: 2233 - RNA, 100 nt, synthetic construct
  source 1..100: mol_type = other RNA
tcctgtaggccaaccaacacgtccgtacgtgatgggggttcacttcgaactcctggcgggggagagccacgctgcaacctagttcacctgatagtcgaca

SEQ ID NO: 2234 - RNA, 100 nt, synthetic construct
  source 1..100: mol_type = other RNA
tcctgggacccaacggttacgtcgatgcgtgacggaagatcacttcgaactcctggcgggggagagccacgctgatccccagttcaacggatagtcgaca

SEQ ID NO: 2235 - RNA, 100 nt, synthetic construct
  source 1..100: mol_type = other RNA
tcctgggacccaacggttacgtcgatgcgtgacggaagatcacttcgaactcctggcgggggagagccacgctgatccccagttcacctgatagtcgaca

SEQ ID NO: 2236 - RNA, 100 nt, synthetic construct
  source 1..100: mol_type = other RNA
tcctaggccccaagaagtacgtgagagcgtgtaggggcatcacttcgaactcctggcgggggagagccacgctgtatgttagttcaacggatagtcgaca

SEQ ID NO: 2237 - RNA, 100 nt, synthetic construct
  source 1..100: mol_type = other RNA
tcctaggccccaagaagtacgtgagagcgtgtaggggcatcacttcgaactcctggcgggggagagccacgctgtatgttagttcacctgatagtcgaca

SEQ ID NO: 2238 - RNA, 100 nt, synthetic construct
  source 1..100: mol_type = other RNA
tccatccccccatagcgtacggggcagcgtttcaagccatcacttcgaactcctggcgggggagagccacgctgacacctagttcaggagatagtcgaca

SEQ ID NO: 2239 - RNA, 100 nt, synthetic construct
  source 1..100: mol_type = other RNA
tccatccccccatagcgtacggggcagcgtttcaagccatcacttcgaactcctggcgggggagagccacgctgacacctagttcacctgatagtcgaca

SEQ ID NO: 2240 - RNA, 100 nt, synthetic construct
  source 1..100: mol_type = other RNA
tcggatcccccctgccgtactggccagcggtaatgtccatcacttcgaactcctggcgggggagagccacgctgacgactagttcacctgatagtcgaca

SEQ ID NO: 2241 - RNA, 100 nt, synthetic construct
  source 1..100: mol_type = other RNA
tcctgtccgggaacccggtagtcccaaatctctcttccatcacttcgaactcctggcgggggagagccacgctgtacaccagttcagaagatagtcgaca

SEQ ID NO: 2242 - RNA, 100 nt, synthetic construct
  source 1..100: mol_type = other RNA
tcctgtccgggaacccggtagtcccaaatctctcttccatcacttcgaactcctggcgggggagagccacgctgtacaccagttcacctgatagtcgaca

SEQ ID NO: 2243 - RNA, 100 nt, synthetic construct
  source 1..100: mol_type = other RNA
tcctgtcagacaacccatccgtccctaatttatcttccatcacttcgaactcctggcgggggagagccacgctgcccgtcagttcaagagatagtcgaca

SEQ ID NO: 2244 - RNA, 100 nt, synthetic construct
  source 1..100: mol_type = other RNA
tcctgtcagacaacccatccgtccctaatttatcttccatcacttcgaactcctggcgggggagagccacgctgcccgtcagttcacctgatagtcgaca

SEQ ID NO: 2245 - RNA, 100 nt, synthetic construct
  source 1..100: mol_type = other RNA
tcctgtcgggcaacccaaccgtccctcggtgatcccacatcacatgtgtctcctggcgggggagagccacgctggaagtttgttcacctgatagtcgaca

SEQ ID NO: 2246 - RNA, 100 nt, synthetic construct
  source 1..100: mol_type = other RNA
tcctgtaggccaaccgcaacgtccgttcgtgatggaccatcaacagttactcctggcgggggagagccacgctgggtgctcgttcacctgatagtcgaca

SEQ ID NO: 2247 - RNA, 100 nt, synthetic construct
  source 1..100: mol_type = other RNA
tcctgaagcccaacgaatacgtcgatgcgtgacagtccatctttaacaactcctggcgggggagagccacgctgggagaccgttcacctgatagtcgaca

SEQ ID NO: 2248 - RNA, 100 nt, synthetic construct
  source 1..100: mol_type = other RNA
tcctaggccccaaggggtacgtgagagcgtgtagttccatagtgaggaactcctggcgggggagagccacgctggctgcctgttcacctgatagtcgaca

SEQ ID NO: 2249 - RNA, 100 nt, synthetic construct
  source 1..100: mol_type = other RNA
tccatccccccatggcgtacggagcagcgttcccttccaatgtagcgaactcctggcgggggagagccacgctggccacctgttcacggcatagtcgaca

SEQ ID NO: 2250 - RNA, 100 nt, synthetic construct
  source 1..100: mol_type = other RNA
tccatccccccatggcgtacggagcagcgttcccttccaatgtagcgaactcctggcgggggagagccacgctggccacctgttcacctgatagtcgaca

SEQ ID NO: 2251 - RNA, 100 nt, synthetic construct
  source 1..100: mol_type = other RNA
tcaactcccccctaccgtacccaccagcgccttcttcccagtgatcgaactcctggcgggggagagccacgctggccatatgttcacaccatagtcgaca

SEQ ID NO: 2252 - RNA, 100 nt, synthetic construct
  source 1..100: mol_type = other RNA
tcaactcccccctaccgtacccaccagcgccttcttcccagtgatcgaactcctggcgggggagagccacgctggccatatgttcacctgatagtcgaca

SEQ ID NO: 2253 - RNA, 100 nt, synthetic construct
  source 1..100: mol_type = other RNA
tcctgtcccagtacccgtctctcccagaaggatcttgatgttcttcgaactcctggcgggggagagccacgctggaccctcgttcacataatagtcgaca

SEQ ID NO: 2254 - RNA, 100 nt, synthetic construct
  source 1..100: mol_type = other RNA
tcctgtcccagtacccgtctctcccagaaggatcttgatgttcttcgaactcctggcgggggagagccacgctggaccctcgttcacctgatagtcgaca

SEQ ID NO: 2255 - RNA, 100 nt, synthetic construct
  source 1..100: mol_type = other RNA
tcctgtagaccaaccgcaacgtccgtacgtgatattagttcacttcgaactcctggcgggggagagccacgctggccggccgttcacgacatagtcgaca

SEQ ID NO: 2256 - RNA, 100 nt, synthetic construct
  source 1..100: mol_type = other RNA
tcctgtagaccaaccgcaacgtccgtacgtgatattagttcacttcgaactcctggcgggggagagccacgctggccggccgttcacctgatagtcgaca

SEQ ID NO: 2257 - RNA, 100 nt, synthetic construct
  source 1..100: mol_type = other RNA
tcctgaagcccaacagatacgtcgacgcgtgagaccagatcacttcgaactcctggcgggggagagccacgctggacatttgttcacgaaatagtcgaca

SEQ ID NO: 2258 - RNA, 100 nt, synthetic construct
  source 1..100: mol_type = other RNA
tcctgaagcccaacagatacgtcgacgcgtgagaccagatcacttcgaactcctggcgggggagagccacgctggacatttgttcacctgatagtcgaca

SEQ ID NO: 2259 - RNA, 100 nt, synthetic construct
  source 1..100: mol_type = other RNA
tccttaaccccaagaggtacgtagaagcgtgcggccgcatcacttcgaactcctggcgggggagagccacgctggagtaccgttcacatcatagtcgaca

SEQ ID NO: 2260 - RNA, 100 nt, synthetic construct
  source 1..100: mol_type = other RNA
tccttaaccccaagaggtacgtagaagcgtgcggccgcatcacttcgaactcctggcgggggagagccacgctggagtaccgttcacctgatagtcgaca

SEQ ID NO: 2261 - RNA, 100 nt, synthetic construct
  source 1..100: mol_type = other RNA
tccacccccccacagcgtacggcacagcgtcctaccccatcacttcgaactcctggcgggggagagccacgctggcgttttgttcacggtatagtcgaca

SEQ ID NO: 2262 - RNA, 100 nt, synthetic construct
  source 1..100: mol_type = other RNA
tccacccccccacagcgtacggcacagcgtcctaccccatcacttcgaactcctggcgggggagagccacgctggcgttttgttcacctgatagtcgaca

SEQ ID NO: 2263 - RNA, 100 nt, synthetic construct
  source 1..100: mol_type = other RNA
tcaaatcccccccgccgtactggccagcggccaagtccatcacttcgaactcctggcgggggagagccacgctggaggggtgttcacgacatagtcgaca

SEQ ID NO: 2264 - RNA, 100 nt, synthetic construct
  source 1..100: mol_type = other RNA
tcaaatcccccccgccgtactggccagcggccaagtccatcacttcgaactcctggcgggggagagccacgctggaggggtgttcacctgatagtcgaca

SEQ ID NO: 2265 - RNA, 100 nt, synthetic construct
  source 1..100: mol_type = other RNA
tcctgtcccgatacccgttaatcccagatgcagcttccatcacttcgaactcctggcgggggagagccacgctgggatgccgttcacaatatagtcgaca

SEQ ID NO: 2266 - RNA, 100 nt, synthetic construct
  source 1..100: mol_type = other RNA
tcctgtcccgatacccgttaatcccagatgcagcttccatcacttcgaactcctggcgggggagagccacgctgggatgccgttcacctgatagtcgaca

SEQ ID NO: 2267 - RNA, 100 nt, synthetic construct
  source 1..100: mol_type = other RNA
tcctgtccgagaacccggtggtcccatgactttcttccatcacttcgaactcctggcgggggagagccacgctggacacacgttcacagtatagtcgaca

SEQ ID NO: 2268 - RNA, 100 nt, synthetic construct
  source 1..100: mol_type = other RNA
tcctgtccgagaacccggtggtcccatgactttcttccatcacttcgaactcctggcgggggagagccacgctggacacacgttcacctgatagtcgaca

SEQ ID NO: 2269 - RNA, 100 nt, synthetic construct
  source 1..100: mol_type = other RNA
tcctgtcagacaaccctttcgtcccctgaatatcttccatcacttcgaactcctggcgggggagagccacgctggggatgcgttcacggcatagtcgaca

SEQ ID NO: 2270 - RNA, 100 nt, synthetic construct
  source 1..100: mol_type = other RNA
tcctgtcagacaaccctttcgtcccctgaatatcttccatcacttcgaactcctggcgggggagagccacgctggggatgcgttcacctgatagtcgaca

SEQ ID NO: 2271 - RNA, 100 nt, synthetic construct
  source 1..100: mol_type = other RNA
tcctgtaggccaaccgccacgtccgttcgtgatagaccatcaatatatactcctggcgggggagagccacgctggtattcctttcacctgatagtcgaca

SEQ ID NO: 2272 - RNA, 100 nt, synthetic construct
  source 1..100: mol_type = other RNA
tcctggagcccaacgactacgtcagtgcgtgaggatccatcttcctaaactcctggcgggggagagccacgctggtgtacgattcacctgatagtcgaca

SEQ ID NO: 2273 - RNA, 100 nt, synthetic construct
  source 1..100: mol_type = other RNA
tccttagccccaaagggtacgtgggagcgtgcggttccatgtgacagaactcctggcgggggagagccacgctggtgtggtattcacctgatagtcgaca

SEQ ID NO: 2274 - RNA, 100 nt, synthetic construct
  source 1..100: mol_type = other RNA
tccgggcccccacagcgtacgagacagcgtatgcttccagattcacgaactcctggcgggggagagccacgctggtgatgctttcacctgatagtcgaca

SEQ ID NO: 2275 - RNA, 100 nt, synthetic construct
  source 1..100: mol_type = other RNA
tcgactcccccctaccgtacataccagcggcttcttcccctgtatcgaactcctggcgggggagagccacgctggtgtaccattcacctgatagtcgaca

SEQ ID NO: 2276 - RNA, 100 nt, synthetic construct
  source 1..100: mol_type = other RNA
tcctgtcccagcacccgtcaatcccagaccgatcttattgatcttcgaactcctggcgggggagagccacgctggtagttttttcaccccctagtcgaca

SEQ ID NO: 2277 - RNA, 100 nt, synthetic construct
  source 1..100: mol_type = other RNA
tcctgtcccagcacccgtcaatcccagaccgatcttattgatcttcgaactcctggcgggggagagccacgctggtagttttttcacctgatagtcgaca

SEQ ID NO: 2278 - RNA, 100 nt, synthetic construct
  source 1..100: mol_type = other RNA
tcctgtccaagaacccgatggtcccaaaatgatctagaggaacttcgaactcctggcgggggagagccacgctggtaggtttttcaccggttagtcgaca

SEQ ID NO: 2279 - RNA, 100 nt, synthetic construct
  source 1..100: mol_type = other RNA
tcctgtccaagaacccgatggtcccaaaatgatctagaggaacttcgaactcctggcgggggagagccacgctggtaggtttttcacctgatagtcgaca

SEQ ID NO: 2280 - RNA, 100 nt, synthetic construct
  source 1..100: mol_type = other RNA
tcctgtcacacaaccctatcgtccccaagtgatcgggggccacttcgaactcctggcgggggagagccacgctggtattcttttcaccggttagtcgaca

SEQ ID NO: 2281 - RNA, 100 nt, synthetic construct
  source 1..100: mol_type = other RNA
tcctgtcacacaaccctatcgtccccaagtgatcgggggccacttcgaactcctggcgggggagagccacgctggtattcttttcacctgatagtcgaca

SEQ ID NO: 2282 - RNA, 100 nt, synthetic construct
  source 1..100: mol_type = other RNA
tcctgtacaccaaccaccacgtccacccgtgataagaattcacttcgaactcctggcgggggagagccacgctggtagctacttcaccgcttagtcgaca

SEQ ID NO: 2283 - RNA, 100 nt, synthetic construct
  source 1..100: mol_type = other RNA
tcctgtacaccaaccaccacgtccacccgtgataagaattcacttcgaactcctggcgggggagagccacgctggtagctacttcacctgatagtcgaca

SEQ ID NO: 2284 - RNA, 100 nt, synthetic construct
  source 1..100: mol_type = other RNA
tcctgagacccaacggttacgtcagtgcgtgagcagagatcacttcgaactcctggcgggggagagccacgctggtaaacacttcaccatctagtcgaca

SEQ ID NO: 2285 - RNA, 100 nt, synthetic construct
  source 1..100: mol_type = other RNA
tcctgagacccaacggttacgtcagtgcgtgagcagagatcacttcgaactcctggcgggggagagccacgctggtaaacacttcacctgatagtcgaca

SEQ ID NO: 2286 - RNA, 100 nt, synthetic construct
  source 1..100: mol_type = other RNA
tccttggccccaagaggtacgtggaagcgtgcggcgacatcacttcgaactcctggcgggggagagccacgctggtaaccctttcaccgtctagtcgaca

SEQ ID NO: 2287 - RNA, 100 nt, synthetic construct
  source 1..100: mol_type = other RNA
tccttggccccaagaggtacgtggaagcgtgcggcgacatcacttcgaactcctggcgggggagagccacgctggtaaccctttcacctgatagtcgaca

SEQ ID NO: 2288 - RNA, 100 nt, synthetic construct
  source 1..100: mol_type = other RNA
tcccagcccccatggcgtacgcaacagcgtttagcaccatcacttcgaactcctggcgggggagagccacgctggtagccatttcaccctttagtcgaca

SEQ ID NO: 2289 - RNA, 100 nt, synthetic construct
  source 1..100: mol_type = other RNA
tcccagcccccatggcgtacgcaacagcgtttagcaccatcacttcgaactcctggcgggggagagccacgctggtagccatttcacctgatagtcgaca

SEQ ID NO: 2290 - RNA, 100 nt, synthetic construct
  source 1..100: mol_type = other RNA
tcctgtcccgacacccgttaatcccaggatctccttccatcacttcgaactcctggcgggggagagccacgctggtgtcctcttcaccggttagtcgaca

SEQ ID NO: 2291 - RNA, 100 nt, synthetic construct
  source 1..100: mol_type = other RNA
tcctgtcccgacacccgttaatcccaggatctccttccatcacttcgaactcctggcgggggagagccacgctggtgtcctcttcacctgatagtcgaca

SEQ ID NO: 2292 - RNA, 100 nt, synthetic construct
  source 1..100: mol_type = other RNA
tcctgtccaagaacccgccagtcccaagaccctcttccatcacttcgaactcctggcgggggagagccacgctggtaggttcttcaccaactagtcgaca

SEQ ID NO: 2293 - RNA, 100 nt, synthetic construct
  source 1..100: mol_type = other RNA
tcctgtccaagaacccgccagtcccaagaccctcttccatcacttcgaactcctggcgggggagagccacgctggtaggttcttcacctgatagtcgaca

SEQ ID NO: 2294 - RNA, 100 nt, synthetic construct
  source 1..100: mol_type = other RNA
tcctgtaggccaaccaccacgtccgtacgtgatgcgccatcagcagttactcctggcgggggagagccacgctggttgctctatcacctgatagtcgaca

SEQ ID NO: 2295 - RNA, 100 nt, synthetic construct
  source 1..100: mol_type = other RNA
tcctgacacccaacgaatacgtcgacgcgtgacgatccatctaccaaaactcctggcgggggagagccacgctggttgttaactcacctgatagtcgaca

SEQ ID NO: 2296 - RNA, 100 nt, synthetic construct
  source 1..100: mol_type = other RNA
tcctcgaccccaagaagtacgtggaagcgtgcgattccatgtcaaggaactcctggcgggggagagccacgctggttgtgcactcacctgatagtcgaca

SEQ ID NO: 2297 - RNA, 100 nt, synthetic construct
  source 1..100: mol_type = other RNA
tccaaccccccacggcgtacggggcagcgtctacttccacgtgcgcgaactcctggcgggggagagccacgctggttaaccgctcacctatgagtcgaca

SEQ ID NO: 2298 - RNA, 100 nt, synthetic construct
  source 1..100: mol_type = other RNA
tccaaccccccacggcgtacggggcagcgtctacttccacgtgcgcgaactcctggcgggggagagccacgctggttaaccgctcacctgatagtcgaca

SEQ ID NO: 2299 - RNA, 100 nt, synthetic construct
  source 1..100: mol_type = other RNA
tcggatcccccttgccgtacccgccagcgatctcttcctttgtgtcgaactcctggcgggggagagccacgctggttaacttgtcacctgatagtcgaca

SEQ ID NO: 2300 - RNA, 100 nt, synthetic construct
  source 1..100: mol_type = other RNA
tcctgtcccaatacccgtcaatcccagaaggatcttatgaaccttcgaactcctggcgggggagagccacgctggttgccgactcacctcaaagtcgaca

SEQ ID NO: 2301 - RNA, 100 nt, synthetic construct
  source 1..100: mol_type = other RNA
tcctgtcccaatacccgtcaatcccagaaggatcttatgaaccttcgaactcctggcgggggagagccacgctggttgccgactcacctgatagtcgaca

SEQ ID NO: 2302 - RNA, 100 nt, synthetic construct
  source 1..100: mol_type = other RNA
tcctgtccgaaaacccggtagtcccataatgatctcagctaacttcgaactcctggcgggggagagccacgctggttgtagactcaccttcgagtcgaca

SEQ ID NO: 2303 - RNA, 100 nt, synthetic construct
  source 1..100: mol_type = other RNA
tcctgtccgaaaacccggtagtcccataatgatctcagctaacttcgaactcctggcgggggagagccacgctggttgtagactcacctgatagtcgaca

SEQ ID NO: 2304 - RNA, 100 nt, synthetic construct
  source 1..100: mol_type = other RNA
tcctgtcgggcaacccaatcgtcccctagtgatccggaaccacttcgaactcctggcgggggagagccacgctggttgctttgtcacctaccagtcgaca

SEQ ID NO: 2305 - RNA, 100 nt, synthetic construct
  source 1..100: mol_type = other RNA
tcctgtcgggcaacccaatcgtcccctagtgatccggaaccacttcgaactcctggcgggggagagccacgctggttgctttgtcacctgatagtcgaca

SEQ ID NO: 2306 - RNA, 100 nt, synthetic construct
  source 1..100: mol_type = other RNA
tcctgtaggccaaccgccacgtccgcccgtgatgccttttcacttcgaactcctggcgggggagagccacgctggttgccccgtcacctttaagtcgaca

SEQ ID NO: 2307 - RNA, 100 nt, synthetic construct
  source 1..100: mol_type = other RNA
tcctgtaggccaaccgccacgtccgcccgtgatgccttttcacttcgaactcctggcgggggagagccacgctggttgccccgtcacctgatagtcgaca

SEQ ID NO: 2308 - RNA, 100 nt, synthetic construct
  source 1..100: mol_type = other RNA
tcctgcaacccaacgaatacgtcagcgcgtgaggcacaatcacttcgaactcctggcgggggagagccacgctggttatctaatcacctaacagtcgaca

SEQ ID NO: 2309 - RNA, 100 nt, synthetic construct
  source 1..100: mol_type = other RNA
tcctgcaacccaacgaatacgtcagcgcgtgaggcacaatcacttcgaactcctggcgggggagagccacgctggttatctaatcacctgatagtcgaca

SEQ ID NO: 2310 - RNA, 100 nt, synthetic construct
  source 1..100: mol_type = other RNA
tcctgtcccccaacccgtacgtcccagcgtgtaaacacatcacttcgaactcctggcgggggagagccacgctggttgttcggtcacctgatagtcgaca

SEQ ID NO: 2311 - RNA, 100 nt, synthetic construct
  source 1..100: mol_type = other RNA
tcctttaccccaagaagtacgtagaagcgtgtaaacacatcacttcgaactcctggcgggggagagccacgctggttgttcggtcacctccgagtcgaca

SEQ ID NO: 2312 - RNA, 100 nt, synthetic construct
  source 1..100: mol_type = other RNA
tcctttaccccaagaagtacgtagaagcgtgtaaacacatcacttcgaactcctggcgggggagagccacgctggttgttcggtcacctgatagtcgaca

SEQ ID NO: 2313 - RNA, 100 nt, synthetic construct
  source 1..100: mol_type = other RNA
tccacacccccatgacgtacggcacagcgtacacaaccatcacttcgaactcctggcgggggagagccacgctggttacgcgctcacctaaaagtcgaca

SEQ ID NO: 2314 - RNA, 100 nt, synthetic construct
  source 1..100: mol_type = other RNA
tccacacccccatgacgtacggcacagcgtacacaaccatcacttcgaactcctggcgggggagagccacgctggttacgcgctcacctgatagtcgaca

SEQ ID NO: 2315 - RNA, 100 nt, synthetic construct
  source 1..100: mol_type = other RNA
tcctgtcccagcacccgttattcccagaagtcccttccatcacttcgaactcctggcgggggagagccacgctggttattcggtcacctctgagtcgaca

SEQ ID NO: 2316 - RNA, 100 nt, synthetic construct
  source 1..100: mol_type = other RNA
tcctgtcccagcacccgttattcccagaagtcccttccatcacttcgaactcctggcgggggagagccacgctggttattcggtcacctgatagtcgaca

SEQ ID NO: 2317 - RNA, 100 nt, synthetic construct
  source 1..100: mol_type = other RNA
tcctgtccggaaacccgccggtcccataatcttcttccatcacttcgaactcctggcgggggagagccacgctggttgccaactcacctaagagtcgaca

SEQ ID NO: 2318 - RNA, 100 nt, synthetic construct
  source 1..100: mol_type = other RNA
tcctgtccggaaacccgccggtcccataatcttcttccatcacttcgaactcctggcgggggagagccacgctggttgccaactcacctgatagtcgaca

SEQ ID NO: 2319 - RNA, 100 nt, synthetic construct
  source 1..100: mol_type = other RNA
tcctgtcaaacaacccattcgtcccccatttatcttccatcacttcgaactcctggcgggggagagccacgctggttgccatgtcacctccaagtcgaca

SEQ ID NO: 2320 - RNA, 100 nt, synthetic construct
  source 1..100: mol_type = other RNA
tcctgtcaaacaacccattcgtcccccatttatcttccatcacttcgaactcctggcgggggagagccacgctggttgccatgtcacctgatagtcgaca

SEQ ID NO: 2321 - RNA, 100 nt, synthetic construct
  source 1..100: mol_type = other RNA
tccttggccccaaagggtacgtgagagcgtgtaattccatagtatagaactcctggcgggggagagccacgctggttctccccacacctgatagtcgaca

SEQ ID NO: 2322 - RNA, 100 nt, synthetic construct
  source 1..100: mol_type = other RNA
tccatccccccatggcgtacgaggcagcgtacgcttccaaaaagccgaactcctggcgggggagagccacgctggttcccccggcacctgatagtcgaca

SEQ ID NO: 2323 - RNA, 100 nt, synthetic construct
  source 1..100: mol_type = other RNA
tcagatccccctcgccgtacaaaccagcgctctcttcccaagtatcgaactcctggcgggggagagccacgctggttccaatcgcacctgcacgtcgaca

SEQ ID NO: 2324 - RNA, 100 nt, synthetic construct
  source 1..100: mol_type = other RNA
tcagatccccctcgccgtacaaaccagcgctctcttcccaagtatcgaactcctggcgggggagagccacgctggttccaatcgcacctgatagtcgaca

SEQ ID NO: 2325 - RNA, 100 nt, synthetic construct
  source 1..100: mol_type = other RNA
tcctgtcccgacacccgttaatcccagaacgatcttaatagtcttcgaactcctggcgggggagagccacgctggttcccataacacctgtttgtcgaca

SEQ ID NO: 2326 - RNA, 100 nt, synthetic construct
  source 1..100: mol_type = other RNA
tcctgtcccgacacccgttaatcccagaacgatcttaatagtcttcgaactcctggcgggggagagccacgctggttcccataacacctgatagtcgaca

SEQ ID NO: 2327 - RNA, 100 nt, synthetic construct
  source 1..100: mol_type = other RNA
tcctgtccgggaacccgctggtcccacaatgatctagtcggacttcgaactcctggcgggggagagccacgctggttcctctagcacctgtatgtcgaca

SEQ ID NO: 2328 - RNA, 100 nt, synthetic construct
  source 1..100: mol_type = other RNA
tcctgtccgggaacccgctggtcccacaatgatctagtcggacttcgaactcctggcgggggagagccacgctggttcctctagcacctgatagtcgaca

SEQ ID NO: 2329 - RNA, 100 nt, synthetic construct
  source 1..100: mol_type = other RNA
tcctgtcgaacaaccccgccgtcccttagtgatcgctgaccacttcgaactcctggcgggggagagccacgctggttcttactccacctgtctgtcgaca

SEQ ID NO: 2330 - RNA, 100 nt, synthetic construct
  source 1..100: mol_type = other RNA
tcctgtcgaacaaccccgccgtcccttagtgatcgctgaccacttcgaactcctggcgggggagagccacgctggttcttactccacctgatagtcgaca

SEQ ID NO: 2331 - RNA, 100 nt, synthetic construct
  source 1..100: mol_type = other RNA
tcctgtaggccaaccacaacgtccgcccgtgataacttttcacttcgaactcctggcgggggagagccacgctggttcctgtaccacctgctcgtcgaca

SEQ ID NO: 2332 - RNA, 100 nt, synthetic construct
  source 1..100: mol_type = other RNA
tcctgtaggccaaccacaacgtccgcccgtgataacttttcacttcgaactcctggcgggggagagccacgctggttcctgtaccacctgatagtcgaca

SEQ ID NO: 2333 - RNA, 100 nt, synthetic construct
  source 1..100: mol_type = other RNA
tcctggtacccaacggttacgtcggtgcgtgaggtgcaatcacttcgaactcctggcgggggagagccacgctggttctcactccacctgttcgtcgaca

SEQ ID NO: 2334 - RNA, 100 nt, synthetic construct
  source 1..100: mol_type = other RNA
tcctggtacccaacggttacgtcggtgcgtgaggtgcaatcacttcgaactcctggcgggggagagccacgctggttctcactccacctgatagtcgaca

SEQ ID NO: 2335 - RNA, 100 nt, synthetic construct
  source 1..100: mol_type = other RNA
tccttagccccaaaaagtacgtgaaagcgtgtagaagcatcacttcgaactcctggcgggggagagccacgctggttctttcaacacctgtatgtcgaca

SEQ ID NO: 2336 - RNA, 100 nt, synthetic construct
  source 1..100: mol_type = other RNA
tccttagccccaaaaagtacgtgaaagcgtgtagaagcatcacttcgaactcctggcgggggagagccacgctggttctttcaacacctgatagtcgaca

SEQ ID NO: 2337 - RNA, 100 nt, synthetic construct
  source 1..100: mol_type = other RNA
tccccgcccccatggcgtacgcgacagcgtccctcaccatcacttcgaactcctggcgggggagagccacgctggttcctattacacctgtctgtcgaca

SEQ ID NO: 2338 - RNA, 100 nt, synthetic construct
  source 1..100: mol_type = other RNA
tccccgcccccatggcgtacgcgacagcgtccctcaccatcacttcgaactcctggcgggggagagccacgctggttcctattacacctgatagtcgaca

SEQ ID NO: 2339 - RNA, 100 nt, synthetic construct
  source 1..100: mol_type = other RNA
tcgattccccctcgccgtacagaccagcgcttgtatccatcacttcgaactcctggcgggggagagccacgctggttcctttgccacctgtttgtcgaca

SEQ ID NO: 2340 - RNA, 100 nt, synthetic construct
  source 1..100: mol_type = other RNA
tcctgtcccaacacccgtcaatcccagaagtagcttccatcacttcgaactcctggcgggggagagccacgctggttcctataacacctgcttgtcgaca

SEQ ID NO: 2341 - RNA, 100 nt, synthetic construct
  source 1..100: mol_type = other RNA
tcctgtcccaacacccgtcaatcccagaagtagcttccatcacttcgaactcctggcgggggagagccacgctggttcctataacacctgatagtcgaca

SEQ ID NO: 2342 - RNA, 100 nt, synthetic construct
  source 1..100: mol_type = other RNA
tcctgtccacaaacccgaaagtcccaagaccctcttccatcacttcgaactcctggcgggggagagccacgctggttcccactacacctgcccgtcgaca

SEQ ID NO: 2343 - RNA, 100 nt, synthetic construct
  source 1..100: mol_type = other RNA
tcctgtccacaaacccgaaagtcccaagaccctcttccatcacttcgaactcctggcgggggagagccacgctggttcccactacacctgatagtcgaca

SEQ ID NO: 2344 - RNA, 100 nt, synthetic construct
  source 1..100: mol_type = other RNA
tcctgtcgagcaaccccttcgtcccctatatatcttccatcacttcgaactcctggcgggggagagccacgctggttcctcacacacctgtttgtcgaca

SEQ ID NO: 2345 - RNA, 100 nt, synthetic construct
  source 1..100: mol_type = other RNA
tcctgtcgagcaaccccttcgtcccctatatatcttccatcacttcgaactcctggcgggggagagccacgctggttcctcacacacctgatagtcgaca

SEQ ID NO: 2346 - RNA, 100 nt, synthetic construct
  source 1..100: mol_type = other RNA
tcctgtagaccaaccaccacgtccacccgtgatgacccatcagcgtatactcctggcggggctcagccatgctggttcaactcgatcctgatccacgaca

SEQ ID NO: 2347 - RNA, 100 nt, synthetic construct
  source 1..100: mol_type = other RNA
tcctgacacccaacagctacgtcgatgcgtgaagctccatctcagtaaactcctggcggggctcagccatgctggttcaacctgttcctgatcaacgaca

SEQ ID NO: 2348 - RNA, 100 nt, synthetic construct
  source 1..100: mol_type = other RNA
tcctgtcaggcaacccaaccgtcccttggtgatcatacatcaccccttcctcctggcggggctcagccatgctggttcaaaaatttgctgatagtcgaca

SEQ ID NO: 2349 - RNA, 100 nt, synthetic construct
  source 1..100: mol_type = other RNA
tcctgtacaccaaccgacacgtccgttcgtgatgggccatcagagaccactcctggcggggctcagccatgctggttcaaaacagtactgatagtcgaca

SEQ ID NO: 2350 - RNA, 100 nt, synthetic construct
  source 1..100: mol_type = other RNA
tcctggaacccaacggctacgtcaatgcgtgaggctccatctaacataactcctggcggggctcagccatgctggttcaaaaagatgctgatatgagaca

SEQ ID NO: 2351 - RNA, 100 nt, synthetic construct
  source 1..100: mol_type = other RNA
tcctggaacccaacggctacgtcaatgcgtgaggctccatctaacataactcctggcggggctcagccatgctggttcaaaaagatgctgatagtcgaca

SEQ ID NO: 2352 - RNA, 100 nt, synthetic construct
  source 1..100: mol_type = other RNA
tcctgtccgagaacccgaaagtcccaaattgatctcgaatcactcctccgtcctggcggggctcagccatgctggttcaaagggagtatgatagggtaca

SEQ ID NO: 2353 - RNA, 100 nt, synthetic construct
  source 1..100: mol_type = other RNA
tcctgcaacccaacagatacgtcgatgcgtgaggatccatccatactaactcctggcggggctcagccatgctggttcaaagcgttagtgataggataca

SEQ ID NO: 2354 - RNA, 100 nt, synthetic construct
  source 1..100: mol_type = other RNA
tcctgcaacccaacagatacgtcgatgcgtgaggatccatccatactaactcctggcggggctcagccatgctggttcaaagcgttagtgatagtcgaca

SEQ ID NO: 2355 - RNA, 100 nt, synthetic construct
  source 1..100: mol_type = other RNA
tccaaacccccacggcgtacgacacagcgtacgcttccaagtagacgaactcctggcggggctcagccatgctggttcaaaggcaaagtgatagggtaca

SEQ ID NO: 2356 - RNA, 100 nt, synthetic construct
  source 1..100: mol_type = other RNA
tccaaacccccacggcgtacgacacagcgtacgcttccaagtagacgaactcctggcggggctcagccatgctggttcaaaggcaaagtgatagtcgaca

SEQ ID NO: 2357 - RNA, 100 nt, synthetic construct
  source 1..100: mol_type = other RNA
tcctcggccccaagaagtacgtgggagcgtgctaccgcatcacttcgaactcctggcggggctcagccataagctctcaaagaagacctgagcttcgaca

SEQ ID NO: 2358 - RNA, 100 nt, synthetic construct
  source 1..100: mol_type = other RNA
tcctaaaccccaagaagtacgtgggagcgtgtaattccatgtgggagaactcctggcggggctcagccatgctcgaagtaagttcacctgatagtcgaca

SEQ ID NO: 2359 - RNA, 100 nt, synthetic construct
  source 1..100: mol_type = other RNA
tcctgaagcccaacggttacgtcagcgcgtgacaaaagatcacttcgaactcctggcggggctcagccatgctaaccgtaagttcacctgatagtcgaca

SEQ ID NO: 2360 - RNA, 100 nt, synthetic construct
  source 1..100: mol_type = other RNA
tcctgtcacacaacccatccgtccctcagtgatccgacatcacctgtctctcctggcggggctcagccatgctgaccggtagttcagaagatagtcgaca

SEQ ID NO: 2361 - RNA, 100 nt, synthetic construct
  source 1..100: mol_type = other RNA
tcctccgccccaagaagtacgtagaagcgtgtttaggcatcacttcgaactcctggcggggctcagccatgctgatggttagttcacctgatagtcgaca

SEQ ID NO: 2362 - RNA, 100 nt, synthetic construct
  source 1..100: mol_type = other RNA
tcctgtcgggcaacccaatcgtcccttagtgatccagcatcacaatcttctcctggcggggctcagccatgctggcagtctgttcacgaaatagtcgaca

SEQ ID NO: 2363 - RNA, 100 nt, synthetic construct
  source 1..100: mol_type = other RNA
tcctgaagcccaacgactacgtcggcgcgtgacactccatctaagacaactcctggcggggctcagccatgctggagacttgttcacaccatagtcgaca

SEQ ID NO: 2364 - RNA, 100 nt, synthetic construct
  source 1..100: mol_type = other RNA
tcctgtcaggcaacccacccgtccctaagtgatccggcatcacgaatccctcctggcggggctcagccatgctggttgtttaatcacctttcagtcgaca

SEQ ID NO: 2365 - RNA, 100 nt, synthetic construct
  source 1..100: mol_type = other RNA
tcctgtcaggcaacccacccgtccctaagtgatccggcatcacgaatccctcctggcggggctcagccatgctggttgtttaatcacctgatagtcgaca

SEQ ID NO: 2366 - RNA, 100 nt, synthetic construct
  source 1..100: mol_type = other RNA
tcctgtcgggcaaccctatcgtcccctggtgatcatacatcacgctattctcctggcggggctcagccatgctggttccttaaacacctgtacgtcgaca

SEQ ID NO: 2367 - RNA, 100 nt, synthetic construct
  source 1..100: mol_type = other RNA
tcctgtcgggcaaccctatcgtcccctggtgatcatacatcacgctattctcctggcggggctcagccatgctggttccttaaacacctgatagtcgaca

SEQ ID NO: 2368 - RNA, 100 nt, synthetic construct
  source 1..100: mol_type = other RNA
tcctgtccgagaacccggcagtcccaaactgatctcagatcactcatccgtcctggcggggctcagccacgctggttcattacagacctgagtttcgaca

SEQ ID NO: 2369 - RNA, 100 nt, synthetic construct
  source 1..100: mol_type = other RNA
tcctgtacaccaaccaggacgtccaaccgtgatacaccatcagagtctactcctggcggggctcagccacgctctacacaagttctaatgatagggtaca

SEQ ID NO: 2370 - RNA, 100 nt, synthetic construct
  source 1..100: mol_type = other RNA
tcctgaaacccaacgattacgtcggcgcgtgacgctccatctcagaaaactcctggcggggctcagccacgctcatcctaagttccggtgataggataca

SEQ ID NO: 2371 - RNA, 100 nt, synthetic construct
  source 1..100: mol_type = other RNA
tcctgtgggccaaccaagacgtccatacgtgatgcgagttcacttcgaactcctggcggggctcagccacgctaagcccaagttcacctgatagtcgaca

SEQ ID NO: 2372 - RNA, 100 nt, synthetic construct
  source 1..100: mol_type = other RNA
tcctagaccccaaacagtacgtggaagcgtgcaattccatgtttgggaactcctggcggggctcagccacgctgacctgtagttcacctgatagtcgaca

SEQ ID NO: 2373 - RNA, 100 nt, synthetic construct
  source 1..100: mol_type = other RNA
tcctcggccccaaagagtacgtaagagcgtgccggaacatcacttcgaactcctggcggggctcagccacgctgccaggtagttcacctgatagtcgaca

SEQ ID NO: 2374 - RNA, 100 nt, synthetic construct
  source 1..100: mol_type = other RNA
tcctacgccccaaggagtacgtgaaagcgtgtttcaacatcacttcgaagtcctggtgggactcagccacgctgtttcctttgacacctgcatgtcgaca

SEQ ID NO: 2375 - RNA, 100 nt, synthetic construct
  source 1..100: mol_type = other RNA
tcctacgccccaaggagtacgtgaaagcgtgtttcaacatcacttcgaagtcctggtgggactcagccacgctgtttcctttgacacctgatagtcgaca

SEQ ID NO: 2376 - RNA, 100 nt, synthetic construct
  source 1..100: mol_type = other RNA
tcggttcccccccgccgtacccaccagcgaactcttcccctggatcgaactcctagaagggctcagccacgctgcttcaaggttcacctatttcacgaca

SEQ ID NO: 2377 - RNA, 100 nt, synthetic construct
  source 1..100: mol_type = other RNA
tcctaagccccaaaaagtacgtggaagcgtgtttcaacatcacttcgaactcctagaagggctcagccacgctgcttctggacccacctgtgcgtcgaca

SEQ ID NO: 2378 - RNA, 100 nt, synthetic construct
  source 1..100: mol_type = other RNA
tcctaagccccaaaaagtacgtggaagcgtgtttcaacatcacttcgaactcctagaagggctcagccacgctgcttctggacccacctgatagtcgaca

SEQ ID NO: 2379 - RNA, 100 nt, synthetic construct
  source 1..100: mol_type = other RNA
tccttagccccaaggggtacgtgagagcgtgtttcaacatcacttcgaattcctggcggaacttagccacgctgcttctgcctgcacctgtgcgtcgaca

SEQ ID NO: 2380 - RNA, 100 nt, synthetic construct
  source 1..100: mol_type = other RNA
tccttggccccaaggggtacgtggaagcgtgtttcaacatcacttcgaactgctggcggggttcagtcacgctgtttcctttcccacctgtctgtcgaca

SEQ ID NO: 2381 - RNA, 100 nt, synthetic construct
  source 1..100: mol_type = other RNA
tcctacgccccaagaggtacgtaagagcgtgtttcaacatcacttcgaactcctggcggggggcagtcacgctgattcctacggcacctgcatgtcgaca

SEQ ID NO: 2382 - RNA, 100 nt, synthetic construct
  source 1..100: mol_type = other RNA
tcctaaaccccaagaggtacgtaaaagcgtgtttcaacatcacttcgaactccaggcggggttcagccacgcttgtactcttggcacctgtatgtcgaca

SEQ ID NO: 2383 - RNA, 100 nt, synthetic construct
  source 1..100: mol_type = other RNA
tcctaaaccccaagaggtacgtaaaagcgtgtttcaacatcacttcgaactccaggcggggttcagccacgcttgtactcttggcacctgatagtcgaca

SEQ ID NO: 2384 - RNA, 100 nt, synthetic construct
  source 1..100: mol_type = other RNA
tcatatccccctcgccgtacacaccagcgccctcttccccttggtcgaactcgtgtcggggttctgccacgctgctccaaagttcacctttcgaccgaca

SEQ ID NO: 2385 - RNA, 100 nt, synthetic construct
  source 1..100: mol_type = other RNA
tcctaggccccaaagggtacgtgggagcgtgtttcaacatcacttcgaacccctggcgtagctcagccacgcttgtcctctatgcacctgtttgtcgaca

SEQ ID NO: 2386 - RNA, 100 nt, synthetic construct
  source 1..100: mol_type = other RNA
tcgattcccccccgccgtactagccagcggcctcttcccaaggatcgaactcctgtcgggtctcagccacgctgtttcaaagttcacctcctctccgaca

SEQ ID NO: 2387 - RNA, 100 nt, synthetic construct
  source 1..100: mol_type = other RNA
tcctccaccccaagaagtacgtaggagcgtgtttcaacatcacttcgaactcctgtcgggtctcagccacgctgtttctttaaacacctgtacgtcgaca

SEQ ID NO: 2388 - RNA, 100 nt, synthetic construct
  source 1..100: mol_type = other RNA
tcctccaccccaagaagtacgtaggagcgtgtttcaacatcacttcgaactcctgtcgggtctcagccacgctgtttctttaaacacctgatagtcgaca

SEQ ID NO: 2389 - RNA, 100 nt, synthetic construct
  source 1..100: mol_type = other RNA
tcacctccccctaaccgtacaagccagcgccctcttccttgtgatcgaactccttccggggttcagccacgctggtacaaagttcaccttgcgcgcgaca

SEQ ID NO: 2390 - RNA, 100 nt, synthetic construct
  source 1..100: mol_type = other RNA
tcctgtcagacaaccctcccgtcccctggtgatccgtgtccacttcgaactccttccggggttcagccacgctgggattacgttcacatcatagtcgaca

SEQ ID NO: 2391 - RNA, 100 nt, synthetic construct
  source 1..100: mol_type = other RNA
tcctgtcagacaaccctcccgtcccctggtgatccgtgtccacttcgaactccttccggggttcagccacgctgggattacgttcacctgatagtcgaca

SEQ ID NO: 2392 - RNA, 100 nt, synthetic construct
  source 1..100: mol_type = other RNA
tcctcggccccaaaaagtacgtaaaagcgtgtttcaacatcacttcgaactccttccggggttcagccacgctggtactactcgcacctgcttgtcgaca

SEQ ID NO: 2393 - RNA, 100 nt, synthetic construct
  source 1..100: mol_type = other RNA
tcctcggccccaaaaagtacgtaaaagcgtgtttcaacatcacttcgaactccttccggggttcagccacgctggtactactcgcacctgatagtcgaca

SEQ ID NO: 2394 - RNA, 100 nt, synthetic construct
  source 1..100: mol_type = other RNA
tcagttcccccctaccgtactaaccagcgcattcttcccagtaatcgaacttctgtcgggcctcagccacgctggtccaaagttcacctatgacacgaca

SEQ ID NO: 2395 - RNA, 100 nt, synthetic construct
  source 1..100: mol_type = other RNA
tcctcagccccaaggggtacgtaaaagcgtgtttcaacatcacttcgaacttctgtcgggcctcagccacgctggtccttacagcacctgcatgtcgaca

SEQ ID NO: 2396 - RNA, 100 nt, synthetic construct
  source 1..100: mol_type = other RNA
tcctcagccccaaggggtacgtaaaagcgtgtttcaacatcacttcgaacttctgtcgggcctcagccacgctggtccttacagcacctgatagtcgaca

SEQ ID NO: 2397 - RNA, 100 nt, synthetic construct
  source 1..100: mol_type = other RNA
tcacctcccccttaccgtacccgccagcgggttcttcccaataatcgaactcctgtcgggtcttagccacgctgattcaaagttcacctccactacgaca

SEQ ID NO: 2398 - RNA, 100 nt, synthetic construct
  source 1..100: mol_type = other RNA
tccttaaccccaaaaggtacgtacaagcgtgtttcaacatcacttcgaactcctgtcgggtcttagccacgctgattcctgaaacacctgcgtgtcgaca

SEQ ID NO: 2399 - RNA, 100 nt, synthetic construct
  source 1..100: mol_type = other RNA
tccttaaccccaaaaggtacgtacaagcgtgtttcaacatcacttcgaactcctgtcgggtcttagccacgctgattcctgaaacacctgatagtcgaca

SEQ ID NO: 2400 - RNA, 100 nt, synthetic construct
  source 1..100: mol_type = other RNA
tcatctcccccttaccgtacaggccagcgaattcttccccaaagtcgaactccagggagggctcagccacgctgctccaaagttcacctaaggaacgaca

SEQ ID NO: 2401 - RNA, 100 nt, synthetic construct
  source 1..100: mol_type = other RNA
tcgactcccccctgccgtacaggccagcgaattcttcccggccgtcgaactcctatcgggactcagccacgctggtccaaagttcacctcacttccgaca

SEQ ID NO: 2402 - RNA, 100 nt, synthetic construct
  source 1..100: mol_type = other RNA
tcctccaccccaagaagtacgtggaagcgtgtttcaacatcacttcgaactcctatcgggactcagccacgctggtcctttaaacacctgtacgtcgaca

SEQ ID NO: 2403 - RNA, 100 nt, synthetic construct
  source 1..100: mol_type = other RNA
tcctccaccccaagaagtacgtggaagcgtgtttcaacatcacttcgaactcctatcgggactcagccacgctggtcctttaaacacctgatagtcgaca

SEQ ID NO: 2404 - RNA, 100 nt, synthetic construct
  source 1..100: mol_type = other RNA
tcctgtccgaaaacccgatggtcccacattgatctaagatcactggcttgtcctggcgggggagagccacgctggttcatgctcgacctgacattcgaca

SEQ ID NO: 2405 - RNA, 100 nt, synthetic construct
  source 1..100: mol_type = other RNA
tcctgtccgaaaacccgatggtcccacattgatctaagatcactggcttgtcctggcgggggagagccacgctggttcatgctcgacctgatagtcgaca

SEQ ID NO: 2406 - RNA, 100 nt, synthetic construct
  source 1..100: mol_type = other RNA
tcctgtcgggcaacccaatcgtcccctagtgatcccacatcaccgtcttctcctggcgggggagagccacgctggttcatacgtaacctgaacctcgaca

SEQ ID NO: 2407 - RNA, 100 nt, synthetic construct
  source 1..100: mol_type = other RNA
tcctgtcgggcaacccaatcgtcccctagtgatcccacatcaccgtcttctcctggcgggggagagccacgctggttcatacgtaacctgatagtcgaca

SEQ ID NO: 2408 - RNA, 100 nt, synthetic construct
  source 1..100: mol_type = other RNA
tcctgtgaaccaaccgcaacgtccaatcgtgatgcaccatcagcagctactcctggcgggggagagccacgctggttcaccagaaacctgagcatcgaca

SEQ ID NO: 2409 - RNA, 100 nt, synthetic construct
  source 1..100: mol_type = other RNA
tcctgtgaaccaaccgcaacgtccaatcgtgatgcaccatcagcagctactcctggcgggggagagccacgctggttcaccagaaacctgatagtcgaca

SEQ ID NO: 2410 - RNA, 100 nt, synthetic construct
  source 1..100: mol_type = other RNA
tcctgcggcccaacggatacgtcagcgcgtgagactccatctggcaaaactcctggcgggggagagccacgctggttcattcaaaacctgacattcgaca

SEQ ID NO: 2411 - RNA, 100 nt, synthetic construct
  source 1..100: mol_type = other RNA
tcctgcggcccaacggatacgtcagcgcgtgagactccatctggcaaaactcctggcgggggagagccacgctggttcattcaaaacctgatagtcgaca

SEQ ID NO: 2412 - RNA, 100 nt, synthetic construct
  source 1..100: mol_type = other RNA
tcctaagccccaaaaggtacgtaagagcgtgtggttccataccaaggaactcctggcgggggagagccacgctggttcacgtcgaacctgaacctcgaca

SEQ ID NO: 2413 - RNA, 100 nt, synthetic construct
  source 1..100: mol_type = other RNA
tcctaagccccaaaaggtacgtaagagcgtgtggttccataccaaggaactcctggcgggggagagccacgctggttcacgtcgaacctgatagtcgaca

SEQ ID NO: 2414 - RNA, 100 nt, synthetic construct
  source 1..100: mol_type = other RNA
tccatccccccatggcgtacggagcagcgtaaacttccacgtgagcgaactcctggcgggggagagccacgctggttcatgtcgaacctgacactcgaca

SEQ ID NO: 2415 - RNA, 100 nt, synthetic construct
  source 1..100: mol_type = other RNA
tcctgtccaggaacccggcagtcccactctgatctaggatcactgacatgtcctggcgggggagagccacgctggttcaacgacgtcctgattaccgaca

SEQ ID NO: 2416 - RNA, 100 nt, synthetic construct
  source 1..100: mol_type = other RNA
tcctgtccaggaacccggcagtcccactctgatctaggatcactgacatgtcctggcgggggagagccacgctggttcaacgacgtcctgatagtcgaca

SEQ ID NO: 2417 - RNA, 100 nt, synthetic construct
  source 1..100: mol_type = other RNA
tcctgtcgggcaaccctatcgtcccccggtgatccggcatcaccccttcctcctggcgggggagagccacgctggttcaattaactcctgatcaccgaca

SEQ ID NO: 2418 - RNA, 100 nt, synthetic construct
  source 1..100: mol_type = other RNA
tcctgtcgggcaaccctatcgtcccccggtgatccggcatcaccccttcctcctggcgggggagagccacgctggttcaattaactcctgatagtcgaca

SEQ ID NO: 2419 - RNA, 100 nt, synthetic construct
  source 1..100: mol_type = other RNA
tcctggtacccaacgattacgtcggcgcgtgaaagtccatctccgttaactcctggcgggggagagccacgctggttcaatccgatcctgattaacgaca

SEQ ID NO: 2420 - RNA, 100 nt, synthetic construct
  source 1..100: mol_type = other RNA
tcctggtacccaacgattacgtcggcgcgtgaaagtccatctccgttaactcctggcgggggagagccacgctggttcaatccgatcctgatagtcgaca

SEQ ID NO: 2421 - RNA, 100 nt, synthetic construct
  source 1..100: mol_type = other RNA
tccccacccccacgacgtacgacacagcgtccacttccactgaagcgaactcctggcgggggagagccacgctggttcaattaaatcctgattcgcgaca

SEQ ID NO: 2422 - RNA, 100 nt, synthetic construct
  source 1..100: mol_type = other RNA
tcctgtccggaaacccgatggtcccaagatgatctcgaatcactcaaccgtcctggcgggggagagccacgctggttcaaatactgactgataacagaca

SEQ ID NO: 2423 - RNA, 100 nt, synthetic construct
  source 1..100: mol_type = other RNA
tcctgtccggaaacccgatggtcccaagatgatctcgaatcactcaaccgtcctggcgggggagagccacgctggttcaaatactgactgatagtcgaca

SEQ ID NO: 2424 - RNA, 100 nt, synthetic construct
  source 1..100: mol_type = other RNA
tcctgtggaccaaccgtgacgtccgtccgtgataaaccatcaagcgctactcctggcgggggagagccacgctggttcaaacatgtactgatatgggaca

SEQ ID NO: 2425 - RNA, 100 nt, synthetic construct
  source 1..100: mol_type = other RNA
tcctgaagcccaacggttacgtcagcgcgtgaaaatccatccagattaactcctggcgggggagagccacgctggttcaaacaattgctgatattagaca

SEQ ID NO: 2426 - RNA, 100 nt, synthetic construct
  source 1..100: mol_type = other RNA
tcctgaagcccaacggttacgtcagcgcgtgaaaatccatccagattaactcctggcgggggagagccacgctggttcaaacaattgctgatagtcgaca

SEQ ID NO: 2427 - RNA, 100 nt, synthetic construct
  source 1..100: mol_type = other RNA
tccttggccccaagaagtacgtacaagcgtgcaattccatgttgaagaactcctggcgggggagagccacgctggttcaaaccagtgctgatacaagaca

SEQ ID NO: 2428 - RNA, 100 nt, synthetic construct
  source 1..100: mol_type = other RNA
tccttggccccaagaagtacgtacaagcgtgcaattccatgttgaagaactcctggcgggggagagccacgctggttcaaaccagtgctgatagtcgaca

SEQ ID NO: 2429 - RNA, 100 nt, synthetic construct
  source 1..100: mol_type = other RNA
tcctgtccacaaacccggtggtcccatattgatctaagatcactgatgtgtcctggcgggggagagccacgctggttcaaagccgaggtgatagggaaca

SEQ ID NO: 2430 - RNA, 100 nt, synthetic construct
  source 1..100: mol_type = other RNA
tcctgtccacaaacccggtggtcccatattgatctaagatcactgatgtgtcctggcgggggagagccacgctggttcaaagccgaggtgatagtcgaca

SEQ ID NO: 2431 - RNA, 100 nt, synthetic construct
  source 1..100: mol_type = other RNA
tcctgtcagacaaccctcccgtcccctggtgatcccgcatcacggaagcctcctggcgggggagagccacgctggttcaaagaattggtgatagggtaca

SEQ ID NO: 2432 - RNA, 100 nt, synthetic construct
  source 1..100: mol_type = other RNA
tcctgtcagacaaccctcccgtcccctggtgatcccgcatcacggaagcctcctggcgggggagagccacgctggttcaaagaattggtgatagtcgaca

SEQ ID NO: 2433 - RNA, 100 nt, synthetic construct
  source 1..100: mol_type = other RNA
tcctgtggaccaaccaccacgtccgcccgtgatgcaccatcaaacaatactcctggcgggggagagccacgctggttcaaagccccggtgatagggtaca

SEQ ID NO: 2434 - RNA, 100 nt, synthetic construct
  source 1..100: mol_type = other RNA
tcctgtggaccaaccaccacgtccgcccgtgatgcaccatcaaacaatactcctggcgggggagagccacgctggttcaaagccccggtgatagtcgaca

SEQ ID NO: 2435 - RNA, 100 nt, synthetic construct
  source 1..100: mol_type = other RNA
tcctgcggcccaacagatacgtcggtgcgtgaggatccatctggcaaaactcctggcgggggagagccacgctggttcaaagctgtagtgatagggtaca

SEQ ID NO: 2436 - RNA, 100 nt, synthetic construct
  source 1..100: mol_type = other RNA
tcctgcggcccaacagatacgtcggtgcgtgaggatccatctggcaaaactcctggcgggggagagccacgctggttcaaagctgtagtgatagtcgaca

SEQ ID NO: 2437 - RNA, 100 nt, synthetic construct
  source 1..100: mol_type = other RNA
tcctcagccccaagaagtacgtaggagcgtgtgattccatgtgggagaactcctggcgggggagagccacgctggttcaaagatatgatgatagggaaca

SEQ ID NO: 2438 - RNA, 100 nt, synthetic construct
  source 1..100: mol_type = other RNA
tcctcagccccaagaagtacgtaggagcgtgtgattccatgtgggagaactcctggcgggggagagccacgctggttcaaagatatgatgatagtcgaca

SEQ ID NO: 2439 - RNA, 100 nt, synthetic construct
  source 1..100: mol_type = other RNA
tcctgtacaccaaccgagacgtccgtacgtgatggaccatcaaacactactcctggcgggggagagccacgcttatcccaagttcttatgatagggtaca

SEQ ID NO: 2440 - RNA, 100 nt, synthetic construct
  source 1..100: mol_type = other RNA
tcctgtacaccaaccgagacgtccgtacgtgatggaccatcaaacactactcctggcgggggagagccacgcttatcccaagttcacctgatagtcgaca

SEQ ID NO: 2441 - RNA, 100 nt, synthetic construct
  source 1..100: mol_type = other RNA
tcctggaacccaacggttacgtcggcgcgtgaagatccatccataaaaactcctggcgggggagagccacgctatgagcaagttctgatgatagggtaca

SEQ ID NO: 2442 - RNA, 100 nt, synthetic construct
  source 1..100: mol_type = other RNA
tcctggaacccaacggttacgtcggcgcgtgaagatccatccataaaaactcctggcgggggagagccacgctatgagcaagttcacctgatagtcgaca

SEQ ID NO: 2443 - RNA, 100 nt, synthetic construct
  source 1..100: mol_type = other RNA
tccaaacccccatggcgtacgaaacagcgtaaacttccagccgaacgaactcctggcgggggagagccacgctcgacgcaagttctgatgatagggtaca

SEQ ID NO: 2444 - RNA, 100 nt, synthetic construct
  source 1..100: mol_type = other RNA
tccaaacccccatggcgtacgaaacagcgtaaacttccagccgaacgaactcctggcgggggagagccacgctcgacgcaagttcacctgatagtcgaca

SEQ ID NO: 2445 - RNA, 100 nt, synthetic construct
  source 1..100: mol_type = other RNA
tcctgtcccggcacccgtctatcccagaacgatcttgataatcttcgaactcctggcgggggagagccacgctactgacaagttctagtgataggataca

SEQ ID NO: 2446 - RNA, 100 nt, synthetic construct
  source 1..100: mol_type = other RNA
tcctgtccggaaacccgaaagtcccaaattgatctggggcgacttcgaactcctggcgggggagagccacgctagccacaagttcttatgatagggtaca

SEQ ID NO: 2447 - RNA, 100 nt, synthetic construct
  source 1..100: mol_type = other RNA
tcctgtcaggcaacccactcgtccctaagtgatccgattacacttcgaactcctggcgggggagagccacgcttacgataagttccgatgatagggtaca

SEQ ID NO: 2448 - RNA, 100 nt, synthetic construct
  source 1..100: mol_type = other RNA
tcctgtcgaacaacccatccgtccctcggtgatcatacatcacctatctctcctggcgggggagagccacgctgtaaaccagttcaacggatagtcgaca

SEQ ID NO: 2449 - RNA, 100 nt, synthetic construct
  source 1..100: mol_type = other RNA
tcctgcaacccaacaaatacgtcaacgcgtgaatatccatctgagaaaactcctggcgggggagagccacgctgcaaactagttcaggggatagtcgaca

SEQ ID NO: 2450 - RNA, 100 nt, synthetic construct
  source 1..100: mol_type = other RNA
tccttagccccaaagagtacgtagaagcgtgtagttccatataaaggaactcctggcgggggagagccacgctgcaagctagttcaacggatagtcgaca

SEQ ID NO: 2451 - RNA, 100 nt, synthetic construct
  source 1..100: mol_type = other RNA
tcccaacccccacaacgtacgcggcagcgtatacttccacgtgagcgaactcctggcgggggagagccacgctgtgccctagttcaacggatagtcgaca

SEQ ID NO: 2452 - RNA, 100 nt, synthetic construct
  source 1..100: mol_type = other RNA
tcctgtccacaaacccgaaagtcccaaattgatctggatgaacttcgaactcctggcgggggagagccacgctgtctgttagttcagacgatagtcgaca

SEQ ID NO: 2453 - RNA, 100 nt, synthetic construct
  source 1..100: mol_type = other RNA
tcggatcccccctgccgtactggccagcggtaatgtccatcacttcgaactcctggcgggggagagccacgctgacgactagttcagaggatagtcgaca

SEQ ID NO: 2454 - RNA, 100 nt, synthetic construct
  source 1..100: mol_type = other RNA
tcctgtccacaaacccggtagtcccacactgatctgagatcactggcacgtcctggcgggggagagccacgctggatagccgttcacataatagtcgaca

SEQ ID NO: 2455 - RNA, 100 nt, synthetic construct
  source 1..100: mol_type = other RNA
tcctgtcgggcaacccaaccgtccctcggtgatcccacatcacatgtgtctcctggcgggggagagccacgctggaagtttgttcacgaaatagtcgaca

SEQ ID NO: 2456 - RNA, 100 nt, synthetic construct
  source 1..100: mol_type = other RNA
tcctgtaggccaaccgcaacgtccgttcgtgatggaccatcaacagttactcctggcgggggagagccacgctgggtgctcgttcacggaatagtcgaca

SEQ ID NO: 2457 - RNA, 100 nt, synthetic construct
  source 1..100: mol_type = other RNA
tcctgaagcccaacgaatacgtcgatgcgtgacagtccatctttaacaactcctggcgggggagagccacgctgggagaccgttcacacaatagtcgaca

SEQ ID NO: 2458 - RNA, 100 nt, synthetic construct
  source 1..100: mol_type = other RNA
tcctaggccccaaggggtacgtgagagcgtgtagttccatagtgaggaactcctggcgggggagagccacgctggctgcctgttcacgatatagtcgaca

SEQ ID NO: 2459 - RNA, 100 nt, synthetic construct
  source 1..100: mol_type = other RNA
tcctgtcgaacaacccttccgtcccccggtgatcctacatcacaaccctctcctggcgggggagagccacgctggtagctttttcacccattagtcgaca

SEQ ID NO: 2460 - RNA, 100 nt, synthetic construct
  source 1..100: mol_type = other RNA
tcctgtaggccaaccgccacgtccgttcgtgatagaccatcaatatatactcctggcgggggagagccacgctggtattcctttcaccgtctagtcgaca

SEQ ID NO: 2461 - RNA, 100 nt, synthetic construct
  source 1..100: mol_type = other RNA
tcctggagcccaacgactacgtcagtgcgtgaggatccatcttcctaaactcctggcgggggagagccacgctggtgtacgattcaccctctagtcgaca

SEQ ID NO: 2462 - RNA, 100 nt, synthetic construct
  source 1..100: mol_type = other RNA
tccttagccccaaagggtacgtgggagcgtgcggttccatgtgacagaactcctggcgggggagagccacgctggtgtggtattcaccacctagtcgaca

SEQ ID NO: 2463 - RNA, 100 nt, synthetic construct
  source 1..100: mol_type = other RNA
tccgggcccccacagcgtacgagacagcgtatgcttccagattcacgaactcctggcgggggagagccacgctggtgatgctttcaccacctagtcgaca

SEQ ID NO: 2464 - RNA, 100 nt, synthetic construct
  source 1..100: mol_type = other RNA
tcctgtccaggaacccgctggtcccacactgatctcagatcactggttcatcctggcgggggagagccacgctggttgttcgctcacctcacagtcgaca

SEQ ID NO: 2465 - RNA, 100 nt, synthetic construct
  source 1..100: mol_type = other RNA
tcctgtccaggaacccgctggtcccacactgatctcagatcactggttcatcctggcgggggagagccacgctggttgttcgctcacctgatagtcgaca

SEQ ID NO: 2466 - RNA, 100 nt, synthetic construct
  source 1..100: mol_type = other RNA
tcctgtcaagcaacccaaccgtcccctggtgatcagacatcacgcgcttctcctggcgggggagagccacgctggttaatttatcaccttaaagtcgaca

SEQ ID NO: 2467 - RNA, 100 nt, synthetic construct
  source 1..100: mol_type = other RNA
tcctgtcaagcaacccaaccgtcccctggtgatcagacatcacgcgcttctcctggcgggggagagccacgctggttaatttatcacctgatagtcgaca

SEQ ID NO: 2468 - RNA, 100 nt, synthetic construct
  source 1..100: mol_type = other RNA
tcctgtaggccaaccaccacgtccgtacgtgatgcgccatcagcagttactcctggcgggggagagccacgctggttgctctatcaccttcgagtcgaca

SEQ ID NO: 2469 - RNA, 100 nt, synthetic construct
  source 1..100: mol_type = other RNA
tcctgacacccaacgaatacgtcgacgcgtgacgatccatctaccaaaactcctggcgggggagagccacgctggttgttaactcacctctaagtcgaca

SEQ ID NO: 2470 - RNA, 100 nt, synthetic construct
  source 1..100: mol_type = other RNA
tcctcgaccccaagaagtacgtggaagcgtgcgattccatgtcaaggaactcctggcgggggagagccacgctggttgtgcactcacctaccagtcgaca

SEQ ID NO: 2471 - RNA, 100 nt, synthetic construct
  source 1..100: mol_type = other RNA
tcggatcccccttgccgtacccgccagcgatctcttcctttgtgtcgaactcctggcgggggagagccacgctggttaacttgtcacctcccagtcgaca

SEQ ID NO: 2472 - RNA, 100 nt, synthetic construct
  source 1..100: mol_type = other RNA
tcctgtcaagcaaccccctcgtcccctagtgatcgaacatcacatgcctctcctggcgggggagagccacgctggttctcttaccacctgcttgtcgaca

SEQ ID NO: 2473 - RNA, 100 nt, synthetic construct
  source 1..100: mol_type = other RNA
tcctgtcaagcaaccccctcgtcccctagtgatcgaacatcacatgcctctcctggcgggggagagccacgctggttctcttaccacctgatagtcgaca

SEQ ID NO: 2474 - RNA, 100 nt, synthetic construct
  source 1..100: mol_type = other RNA
tcctgtgagccaaccatcacgtccaaccgtgatgcgccatcagaggccactcctggcgggggagagccacgctggttcctcagccacctgcccgtcgaca

SEQ ID NO: 2475 - RNA, 100 nt, synthetic construct
  source 1..100: mol_type = other RNA
tcctgtgagccaaccatcacgtccaaccgtgatgcgccatcagaggccactcctggcgggggagagccacgctggttcctcagccacctgatagtcgaca

SEQ ID NO: 2476 - RNA, 100 nt, synthetic construct
  source 1..100: mol_type = other RNA
tcctgatacccaacgaatacgtcaatgcgtgagactccatctggaataactcctggcgggggagagccacgctggttccccacccacctgcctgtcgaca

SEQ ID NO: 2477 - RNA, 100 nt, synthetic construct
  source 1..100: mol_type = other RNA
tcctgatacccaacgaatacgtcaatgcgtgagactccatctggaataactcctggcgggggagagccacgctggttccccacccacctgatagtcgaca

SEQ ID NO: 2478 - RNA, 100 nt, synthetic construct
  source 1..100: mol_type = other RNA
tccttggccccaaagggtacgtgagagcgtgtaattccatagtatagaactcctggcgggggagagccacgctggttctccccacacctgcttgtcgaca

SEQ ID NO: 2479 - RNA, 100 nt, synthetic construct
  source 1..100: mol_type = other RNA
tccatccccccatggcgtacgaggcagcgtacgcttccaaaaagccgaactcctggcgggggagagccacgctggttcccccggcacctgtttgtcgaca

SEQ ID NO: 2480 - RNA, 101 nt, synthetic construct
  source 1..101: mol_type = other RNA
gccacatgagggtccttggcctttgaaagtcctttcatgaatacagccacggctaattgacatggcttactagtcactgtcgtacattggccactcccagt

SEQ ID NO: 2481 - RNA, 100 nt, synthetic construct
  source 1..100: mol_type = other RNA
gccacatggaggtccttggcctttgaaagtcctttcatgaatacaaccacggcgtcgctattcctttactagtcactgtcgtacattggccactcccagt

SEQ ID NO: 2482 - RNA, 100 nt, synthetic construct
  source 1..100: mol_type = other RNA
gccacacagacctcctctacggttgaaagtcctttcatgaatactctccacggcaatgaatgaattgactagtcactgtcgtacattggccactcccagt

SEQ ID NO: 2483 - RNA, 100 nt, synthetic construct
  source 1..100: mol_type = other RNA
gccacacagacctccttggcaaagctaagtcctttcatgaataattccacggctgatccggggctttactagtcactgtcgtacattggccactcccagt

SEQ ID NO: 2484 - RNA, 100 nt, synthetic construct
  source 1..100: mol_type = other RNA
gccacacagacctcgatctactttgaaagtcctttcatggctacatccacggctcaagaatgtacagactagtcactgtcgtacattggccactcccagt

SEQ ID NO: 2485 - RNA, 100 nt, synthetic construct
  source 1..100: mol_type = other RNA
gccacacagacctcctaaagagttgaaagtcctttcatgtatacatccacgactcctgaccagtgttactagtcactgtcgtacattggccactcccagt

SEQ ID NO: 2486 - RNA, 100 nt, synthetic construct
  source 1..100: mol_type = other RNA
gccacacagacctccttgttaagggaaagtcctttcccgaatacatccacggctaattctcgactttactagtcactgtcgtacattggccactcccagt

SEQ ID NO: 2487 - RNA, 100 nt, synthetic construct
  source 1..100: mol_type = other RNA
gccacacagaccaggatcgcctttgaaagtccttccctgaatacatccacggctacgacagtcctttactagtcactgtcgtacattggccactcccagt

SEQ ID NO: 2488 - RNA, 100 nt, synthetic construct
  source 1..100: mol_type = other RNA
gccacacagacctcattcgactttgaaagtcctttcaggaataactccacggcacggtcattcctttactagtcactgtcgtacattggccactcccagt

SEQ ID NO: 2489 - RNA, 100 nt, synthetic construct
  source 1..100: mol_type = other RNA
gccacacagacctccttgatagcagaaagtcaatttatgaatacatccacggctatttatgtcctttactagtcactgtcgtacattggccactcccagt

SEQ ID NO: 2490 - RNA, 99 nt, synthetic construct
  source 1..99: mol_type = other RNA
gccacacagacctcctcttttgttgaaagtaggttcatgacacatccacggctacgtttctcctttactagtcactgtcgtacattggccactcccagt

SEQ ID NO: 2491 - RNA, 100 nt, synthetic construct
  source 1..100: mol_type = other RNA
gccacacagacctcctatattcttgaaagtccttgcatgaatgcattcacggctatcaggctcctttactagtcactgtcgtacattggccactcccagt

SEQ ID NO: 2492 - RNA, 101 nt, synthetic construct
  source 1..101: mol_type = other RNA
gccacacagacctccttgtatgacgaaagtcctttcatgaatacaatccacggctaatgacgcgtattactagtcactgtcgtacattggccactcccagt

SEQ ID NO: 2493 - RNA, 100 nt, synthetic construct
  source 1..100: mol_type = other RNA
gccacacagacctcctaataagttgaaagtcttttcatgaatacattcacggctaatgacgcgaattactagtcactgtcgtacattggccactcccagt

SEQ ID NO: 2494 - RNA, 100 nt, synthetic construct
  source 1..100: mol_type = other RNA
gccacacagaccaaagatgcctttgaaagtcctttcaggaatacatccacggctaatgaattcctttactgaggtctgtcgtacattggccactcccagt

SEQ ID NO: 2495 - RNA, 100 nt, synthetic construct
  source 1..100: mol_type = other RNA
gccacatagggatccttggcctttgaaagtcctttcaggaatacatccacggctaatctgcggctttactagtcactgtcgtacattggccactcccagt

SEQ ID NO: 2496 - RNA, 100 nt, synthetic construct
  source 1..100: mol_type = other RNA
gccacacagacctcgcgcaactttgaaagtcctttcatgcatagatccacggctacataattccttttggagtcactgtcgtacattggccactcccagt

SEQ ID NO: 2497 - RNA, 100 nt, synthetic construct
  source 1..100: mol_type = other RNA
gccacacagacctccttgatggaggaaagtagcatcatgtttacatccacggctatgcctgtcctttactagtcactgtcgtacattggccactcccagt

SEQ ID NO: 2498 - RNA, 99 nt, synthetic construct
  source 1..99: mol_type = other RNA
gccacacagacctccttggcatacttaagtcctttcatcatacatccacggctaattttgggctttactagtcactgtcgtacattggccactcccagt

SEQ ID NO: 2499 - RNA, 100 nt, synthetic construct
  source 1..100: mol_type = other RNA
gccacacagacctcctattaggttgaaagtactttcatgaatacatccacggctaatttaaaactttactagtcactgtcgtacattggccactcccagt

SEQ ID NO: 2500 - RNA, 99 nt, synthetic construct
  source 1..99: mol_type = other RNA
gccacatgggagtccttggcctttgaaagtcctttaatgaatacatccacggaaatgatatagcttactagtcactgtcgtacattggccactcccagt

SEQ ID NO: 2501 - RNA, 100 nt, synthetic construct
  source 1..100: mol_type = other RNA
gccacacagacctcagacagctttgaaagtcctatcatgaatagatccacggctaatgacggtagttactagtcactgtcgtacattggccactcccagt

SEQ ID NO: 2502 - RNA, 100 nt, synthetic construct
  source 1..100: mol_type = other RNA
gccacatagcggtccttggcctttgaaagtcctttcatgaatacaaccacggctaatttagcgctttactagtcactgtcgtacattggccactcccagt

SEQ ID NO: 2503 - RNA, 99 nt, synthetic construct
  source 1..99: mol_type = other RNA
gccacatgggagtccttggcctttgaaagtcctttcatgatacatccacggctaatccttggctttactagtcactgtcgtacattggccactcccagt

SEQ ID NO: 2504 - RNA, 98 nt, synthetic construct
  source 1..98: mol_type = other RNA
gccacacagacctcctacacggttgaaagtccattcatgaacatccacggctaatttcaagctttactagtcactgtcgtacattggccactcccagt

SEQ ID NO: 2505 - RNA, 100 nt, synthetic construct
  source 1..100: mol_type = other RNA
gccacacagacctcctgaatacttgaaagtcctgtcatgaatacatccacgactaccgtcatcctttactagtcactgtcgtacattggccactcccagt

SEQ ID NO: 2506 - RNA, 101 nt, synthetic construct
  source 1..101: mol_type = other RNA
gccacacagacctccttggcgcgattaagtccccttcatgaatacatccacgggtactgaattccttttgttgtcactgtcgtacattggccactcccagt

SEQ ID NO: 2507 - RNA, 100 nt, synthetic construct
  source 1..100: mol_type = other RNA
gccacacagacctccttggcagcgataagtccgttcatgaaaagatccacggctaatccacgactttactagtcactgtcgtacattggccactcccagt

SEQ ID NO: 2508 - RNA, 100 nt, synthetic construct
  source 1..100: mol_type = other RNA
gccacacagacctcgaacgactttgaaagtcctttcatgaatagatccacggctaattataagctttactagtcactgtcgtacattggccactcccagt

SEQ ID NO: 2509 - RNA, 100 nt, synthetic construct
  source 1..100: mol_type = other RNA
gccacacagacctcgaacgactttgaaagtcctttcatgaatagatccacggctaattataagctttacaccacactgtcgtcgaatggccactcccagt

SEQ ID NO: 2510 - RNA, 100 nt, synthetic construct
  source 1..100: mol_type = other RNA
gccacacagacctccttggcgatcacaagtcctttcatgaataaatccacggttaatgaccagtgttactagtcactgtcgtacattggccactcccagt

SEQ ID NO: 2511 - RNA, 99 nt, synthetic construct
  source 1..99: mol_type = other RNA
gccacacagaccaggtatgcctttgaaagtagttcatgaatacaaccacggctacacaattcctttcttggtcactgtcgtacattggccactcccagt

SEQ ID NO: 2512 - RNA, 99 nt, synthetic construct
  source 1..99: mol_type = other RNA
gccacacagacctccttgttgaaggaaagtccttcgtgaatacatccacggctaatctggggctttactagtcactgtcgtacattggccactcccagt

SEQ ID NO: 2513 - RNA, 100 nt, synthetic construct
  source 1..100: mol_type = other RNA
gccacacagacctccttgtaggaggaaagtcctttcatgaatacatgcacggctaatgatcggtgttactagtcactgtcgtacattggccactcccagt

SEQ ID NO: 2514 - RNA, 100 nt, synthetic construct
  source 1..100: mol_type = other RNA
gccacacagaccatagacgcctttgaaagtgctttcatgaatacatccacggctactgaattcctttcttggtcactgtcgtacattggccactcccagt

SEQ ID NO: 2515 - RNA, 100 nt, synthetic construct
  source 1..100: mol_type = other RNA
gccacacagacctccttggcggcatcaagtaatttcatgaatacatccacggctacgacggtcctttactagtcactgtcgtacattggccactcccagt

SEQ ID NO: 2516 - RNA, 100 nt, synthetic construct
  source 1..100: mol_type = other RNA
gccacacagaccggaaatgcctttgaaagtcccgccatgaataattccacggctatggacgatggttactagtcactgtcgtacattggccactcccagt

SEQ ID NO: 2517 - RNA, 100 nt, synthetic construct
  source 1..100: mol_type = other RNA
gccacacagacctccttggcggcgccaagtgatttgatgaatacatccacggctagtttccaactttactagtcactgtcgtacattggccactcccagt

SEQ ID NO: 2518 - RNA, 100 nt, synthetic construct
  source 1..100: mol_type = other RNA
gccacacagacctccttggcacggttaagtccttcgatgaatacgtccacggcttttgaatgcatcgactagtcactgtcgtacattggccactcccagt

SEQ ID NO: 2519 - RNA, 100 nt, synthetic construct
  source 1..100: mol_type = other RNA
gccacacagacctccttgatagtggaaagtcctttcatgaatacatccacgggtaatcgccgactttactagtcactgtcgtacattggccactcccagt

SEQ ID NO: 2520 - RNA, 100 nt, synthetic construct
  source 1..100: mol_type = other RNA
gccacacagacctcaagatactttgaaagtcctttcatgcatacattcacggctaatgaattcctttactgatttctgtcgtacattggccactcccagt

SEQ ID NO: 2521 - RNA, 100 nt, synthetic construct
  source 1..100: mol_type = other RNA
gccacatgggcatccttggcctttgaaagtcctttcatgtatacatccacggcagttacattcctttactagtcactgtcgtacattggccactcccagt

SEQ ID NO: 2522 - RNA, 100 nt, synthetic construct
  source 1..100: mol_type = other RNA
gccacacagacctccttggcgacaacaagtcctctcatgaataattccacggctaccgttctcctttactagtcactgtcgtacattggccactcccagt

SEQ ID NO: 2523 - RNA, 100 nt, synthetic construct
  source 1..100: mol_type = other RNA
gccacatgggggtccttggcctttgaaagtcctttcatgaatatatccacggctaatgacgattattactagtcactgtcgtacattggccactcccagt

SEQ ID NO: 2524 - RNA, 101 nt, synthetic construct
  source 1..101: mol_type = other RNA
gccacacagacctccttgtagtgcgaaagtcctttcatgaataagatccacggctacgtaactcctttactagtcactgtcgtacattggccactcccagt

SEQ ID NO: 2525 - RNA, 100 nt, synthetic construct
  source 1..100: mol_type = other RNA
gccacacagacctcctaataaattgaaagtcctttcaagaatacatccacggctaatgaattcctttttgtttcactgtcgtacattggccactcccagt

SEQ ID NO: 2526 - RNA, 102 nt, synthetic construct
  source 1..102: mol_type = other RNA
gccacacagacctccttgaatagggaaagtccatattcatgaatacccccacggctaatgaatggaccgactagtcactgtcgtacattggccactcccagt

SEQ ID NO: 2527 - RNA, 101 nt, synthetic construct
  source 1..101: mol_type = other RNA
gccacacagaccaatgctgcctttgaaagtcctttgcatcattacatccacggctaataggcggctttactagtcactgtcgtacattggccactcccagt

SEQ ID NO: 2528 - RNA, 100 nt, synthetic construct
  source 1..100: mol_type = other RNA
gccacacagacctcctctcatcttgaaagtcgactttcatgaatacatccacggaatgaattccttttgtaatcactgtcgtacattggccactcccagt

SEQ ID NO: 2529 - RNA, 101 nt, synthetic construct
  source 1..101: mol_type = other RNA
gccacacagacctcctctcgacttgaaagtccctttcatgaatttctccacggctacgactgtcctttactagtcactgtcgtacattggccactcccagt

SEQ ID NO: 2530 - RNA, 101 nt, synthetic construct
  source 1..101: mol_type = other RNA
gccacacagacctccttgtatatcgaaagtcctttaatgaatagaatccacggctaatccttggctttactagtcactgtcgtacattggccactcccagt

SEQ ID NO: 2531 - RNA, 100 nt, synthetic construct
  source 1..100: mol_type = other RNA
gccacacagacctcgcatcactttgaaagtactttcattaatacatccacggctacgtcgctcctttactagtcactgtcgtacattggccactcccagt

SEQ ID NO: 2532 - RNA, 99 nt, synthetic construct
  source 1..99: mol_type = other RNA
gccacacagacctccttggcaagtccaagtcctttcatcaatacatccacggccatgacgcgggttactagtcactgtcgtacattggccactcccagt

SEQ ID NO: 2533 - RNA, 100 nt, synthetic construct
  source 1..100: mol_type = other RNA
gccacacagaccagaagtgcctttgaaagtcctttcatgaatacaaccacggctaatttggtactttactagtcactgtcgtacattggccactcccagt

SEQ ID NO: 2534 - RNA, 101 nt, synthetic construct
  source 1..101: mol_type = other RNA
gccacacagacctcctaataggttgaaagtcctttcgtaaatacatccacggctaatagatgaggcttactagtcactgtcgtacattggccactcccagt

SEQ ID NO: 2535 - RNA, 100 nt, synthetic construct
  source 1..100: mol_type = other RNA
gccacacagacctccttggcgcgcataagtcctttcatgaatacctccacggctaatcgcccgctttactagtcactgtcgtacattggccactcccagt

SEQ ID NO: 2536 - RNA, 101 nt, synthetic construct
  source 1..101: mol_type = other RNA
gccacacagacctccttgatggcggaaagtcccttcatgaatactatccacggctctacaattcctttactggagtctgtcgtacattggccactcccagt

SEQ ID NO: 2537 - RNA, 100 nt, synthetic construct
  source 1..100: mol_type = other RNA
gccacacagacctcctatagagttgaaagtcctttcatgaatacatctacggctaatcgccgactttactagtcactgtcgtacattggccactcccagt

SEQ ID NO: 2538 - RNA, 100 nt, synthetic construct
  source 1..100: mol_type = other RNA
gccacacagacctcctcatgaattgaaagtcctttcatgaatacagacacggctaatgaattccttttgttttcactgtcgtacattggccactcccagt

SEQ ID NO: 2539 - RNA, 100 nt, synthetic construct
  source 1..100: mol_type = other RNA
gccacacagacctcctacaaggttgaaagtccttacatgaattcatccacgtgtattgaattccttttgaggtcactgtcgtacattggccactcccagt

SEQ ID NO: 2540 - RNA, 100 nt, synthetic construct
  source 1..100: mol_type = other RNA
gccacacagacctccttggcgacgccaagtcctttcatgaatacatccacggataattcttagctttactagtcactgtcgtacattggccactcccagt

SEQ ID NO: 2541 - RNA, 100 nt, synthetic construct
  source 1..100: mol_type = other RNA
gccacacagacctcctcattgattgaaagtaatttcatgaatacatccacggctactactgtcctttactagtcactgtcgtacattggccactcccagt

SEQ ID NO: 2542 - RNA, 100 nt, synthetic construct
  source 1..100: mol_type = other RNA
gccacacagacctccttgttatcggaaagtcctttcatgaatacaaccacggctaatacccggctttactagtcactgtcgtacattggccactcccagt

SEQ ID NO: 2543 - RNA, 100 nt, synthetic construct
  source 1..100: mol_type = other RNA
gccacacagacctcgactaactttgaaagtcctttcatgaatagctccacggctactagtgtcctttactagtcactgtcgtacattggccactcccagt

SEQ ID NO: 2544 - RNA, 100 nt, synthetic construct
  source 1..100: mol_type = other RNA
gccacacagacctcctgttatgttgaaagtagtttcatgaatacagccacgactaatgaatgcgacgactagtcactgtcgtacattggccactcccagt

SEQ ID NO: 2545 - RNA, 97 nt, synthetic construct
  source 1..97: mol_type = other RNA
gccacacagaccggacaagcctttgaaagtaacttcatatcatccacggctacgtttctcctttactagtcactgtcgtacattggccactcccagt

SEQ ID NO: 2546 - RNA, 100 nt, synthetic construct
  source 1..100: mol_type = other RNA
gccacacagacctcctccagagttgaaagtccttttatgaatacatccacggctaattcctagctttactagtcactgtcgtacattggccactcccagt

SEQ ID NO: 2547 - RNA, 100 nt, synthetic construct
  source 1..100: mol_type = other RNA
gccacacagacctcgaccgactttgaaagtcctttcatgcctacatccacggctaatcccgaactttactagtcactgtcgtacattggccactcccagt

SEQ ID NO: 2548 - RNA, 100 nt, synthetic construct
  source 1..100: mol_type = other RNA
gccacacagacctcaccccactttgaaagtcctttcattaatacttccacggctaatgaattcctttttgtgtcactgtcgtacattggccactcccagt

SEQ ID NO: 2549 - RNA, 100 nt, synthetic construct
  source 1..100: mol_type = other RNA
gccacacagacctcgaacgactttgaaagtcctttcatgaatagttccacggctaccaatgtcctttactagtcactgtcgtacattggccactcccagt

SEQ ID NO: 2550 - RNA, 100 nt, synthetic construct
  source 1..100: mol_type = other RNA
gccacacagacctcctaatgaattgaaagtcctttcatgtatacatccacggttaatcaccgactttactagtcactgtcgtacattggccactcccagt

SEQ ID NO: 2551 - RNA, 100 nt, synthetic construct
  source 1..100: mol_type = other RNA
gccacacagacctcctgttatattgaaagtgacgacatgaatacatccacggctaatgaattccttttgaaatcactgtcgtacattggccactcccagt

SEQ ID NO: 2552 - RNA, 100 nt, synthetic construct
  source 1..100: mol_type = other RNA
gccacacagacctccttgttagcagaaagtatcttcataaatagatccacggctaatgaattcctttactagaatctgtcgtacattggccactcccagt

SEQ ID NO: 2553 - RNA, 100 nt, synthetic construct
  source 1..100: mol_type = other RNA
gccacacagacctcctacattcttgaaagtagtttcgtgaatacatccacggctattcacctcctttactagtcactgtcgtacattggccactcccagt

SEQ ID NO: 2554 - RNA, 100 nt, synthetic construct
  source 1..100: mol_type = other RNA
gccacacagaccagagctgcctttgaaagtcctttgttgaatagatccacggctaatgaattccttttggtatcactgtcgtacattggccactcccagt

SEQ ID NO: 2555 - RNA, 100 nt, synthetic construct
  source 1..100: mol_type = other RNA
gccacatgtatatccttggcctttgaaagtccattcatgaatacatccacggctacgtcggtcctttactagtcactgtcgtacattggccactcccagt

SEQ ID NO: 2556 - RNA, 99 nt, synthetic construct
  source 1..99: mol_type = other RNA
gccacacagaccggagttgcctttgaaagtcctttcatgaatacacacacggcaatgaattcctttctcgttcactgtcgtacattggccactcccagt

SEQ ID NO: 2557 - RNA, 100 nt, synthetic construct
  source 1..100: mol_type = other RNA
gccacacagacctcctattgacttgaaagtccattcatgaatacatccacggtttatgaatggcatgactagtcactgtcgtacattggccactcccagt

SEQ ID NO: 2558 - RNA, 100 nt, synthetic construct
  source 1..100: mol_type = other RNA
gccacacagacctccttgtatgtggaaagtcctttgctgaatacatccacgtgtaatctctaactttactagtcactgtcgtacattggccactcccagt

SEQ ID NO: 2559 - RNA, 100 nt, synthetic construct
  source 1..100: mol_type = other RNA
gccacacagacctccttggcctggacttgtcctttcactaatacatgcacggctaatactatactttactagtcactgtcgtacattggccactcccagt

SEQ ID NO: 2560 - RNA, 100 nt, synthetic construct
  source 1..100: mol_type = other RNA
gccacacagaccaagcgcgcctttgaaagtccattcattaataactccacggctaatttcttactttactagtcactgtcgtacattggccactcccagt

SEQ ID NO: 2561 - RNA, 99 nt, synthetic construct
  source 1..99: mol_type = other RNA
gccacacagaccaaggtcgcctttgaaagtgtttcaagaatacctccacggctacgtagatcctttactagtcactgtcgtacattggccactcccagt

SEQ ID NO: 2562 - RNA, 100 nt, synthetic construct
  source 1..100: mol_type = other RNA
gccacacagacctccttggcaggctcaagtcctttcatgaatacccccacggctaatgaattcctttacttttgtctgtcgtacattggccactcccagt

SEQ ID NO: 2563 - RNA, 98 nt, synthetic construct
  source 1..98: mol_type = other RNA
gccacacagacctccttgtaaaaggaaagtcctttcatgaatacatccacgggttgaattcctttactggggtctgtcgtacattggccactcccagt

SEQ ID NO: 2564 - RNA, 100 nt, synthetic construct
  source 1..100: mol_type = other RNA
gccacacagacctccttgaagacagaaagttctttcatgaatacatccacggctaattacgtactttactagtcactgtcgtacattggccactcccagt

SEQ ID NO: 2565 - RNA, 100 nt, synthetic construct
  source 1..100: mol_type = other RNA
gccacacagacctcctaacaggttgaaagtcctttcatctttacttccacggctaccgtagtcctttactagtcactgtcgtacattggccactcccagt

SEQ ID NO: 2566 - RNA, 100 nt, synthetic construct
  source 1..100: mol_type = other RNA
gccacacagacctccttggcaataataagtcctttcatgaatacatccacggctaataaataggacgactagtcactgtcgtacattggccactcccagt

SEQ ID NO: 2567 - RNA, 102 nt, synthetic construct
  source 1..102: mol_type = other RNA
gccacacagacctcctatttacttgaaagtcctgtcatgaatacatccacggcggtaatccggggctttactagtcactgtcgtacattggccactcccagt

SEQ ID NO: 2568 - RNA, 100 nt, synthetic construct
  source 1..100: mol_type = other RNA
gccacacagacctcctccattcttgaaagtccttttatgaatagatccacggcaaatgaattccttttagtgtcactgtcgtacattggccactcccagt

SEQ ID NO: 2569 - RNA, 101 nt, synthetic construct
  source 1..101: mol_type = other RNA
gccacatgaaagtccttggcctttgaaagtcctttgatgaatacatccacggctacgcgacacagattactagtcactgtcgtacattggccactcccagt

SEQ ID NO: 2570 - RNA, 99 nt, synthetic construct
  source 1..99: mol_type = other RNA
gccacacagacctcctaacagattgaaagttattcatgaatacatccacggctaatgaattccttttgaaatcactgtcgtacattggccactcccagt

SEQ ID NO: 2571 - RNA, 102 nt, synthetic construct
  source 1..102: mol_type = other RNA
gccacatggttatccttggcctttgaaagtcctggtgcttgaatcaatccacggctacgacagtcctttactagtcactgtcgtacattggccactcccagt

SEQ ID NO: 2572 - RNA, 100 nt, synthetic construct
  source 1..100: mol_type = other RNA
gccacatggtagtccttggcctttgaaagtcctttcatgaatacattcacggctcatgaattccttttttgatcactgtcgtacattggccactcccagt

SEQ ID NO: 2573 - RNA, 99 nt, synthetic construct
  source 1..99: mol_type = other RNA
gccacacagacctcctgttttattgaaagtccttgcatggatactccacggctacgatagtcctttactagtcactgtcgtacattggccactcccagt

SEQ ID NO: 2574 - RNA, 100 nt, synthetic construct
  source 1..100: mol_type = other RNA
gccacacagacctccttgtagacggaaagtggtttcattcatagatccacggctacgacgctcctttactagtcactgtcgtacattggccactcccagt

SEQ ID NO: 2575 - RNA, 100 nt, synthetic construct
  source 1..100: mol_type = other RNA
gccacacagacctccttgtaagtagaaagtcctttcatgaataccaccacggccaatgacacgacttactagtcactgtcgtacattggccactcccagt

SEQ ID NO: 2576 - RNA, 100 nt, synthetic construct
  source 1..100: mol_type = other RNA
gccacacagacctccttggcggggttaagtcctttcatgaatacacccacggctaatccttggctttactagtcactgtcgtacattggccactcccagt

SEQ ID NO: 2577 - RNA, 100 nt, synthetic construct
  source 1..100: mol_type = other RNA
gccacacagacctcctgaaatgttgaaagtcctttcatgaatacatccacgggtaattatacgctttactagtcactgtcgtacattggccactcccagt

SEQ ID NO: 2578 - RNA, 101 nt, synthetic construct
  source 1..101: mol_type = other RNA
gccacacagacctccttgtagaccgaaagtcctttcatgaatatcatccatagctaattgcacactttactagtcactgtcgtacattggccactcccagt

SEQ ID NO: 2579 - RNA, 100 nt, synthetic construct
  source 1..100: mol_type = other RNA
gccacacagacctcgcaatgctttgaaagtcctttcatgaataaatccacggctaatgaatgagacgactagtcactgtcgtacattggccactcccagt

SEQ ID NO: 2580 - RNA, 99 nt, synthetic construct
  source 1..99: mol_type = other RNA
gccacacagacctcctatcaagttgaaagtcctttcagcatacatccacggctaatgaattccttttgttttcactgtcgtacattggccactcccagt

SEQ ID NO: 2581 - RNA, 100 nt, synthetic construct
  source 1..100: mol_type = other RNA
gccacacagacctccttggcggagccaagtcctttcatgaatacaaccacggcgacggaccagggttactagtcactgtcgtacattggccactcccagt

SEQ ID NO: 2582 - RNA, 100 nt, synthetic construct
  source 1..100: mol_type = other RNA
gccacacagacctcctcttatattgaaagtcctttcatgaatatatcgacggctacgacaatcctttactagtcactgtcgtacattggccactcccagt

SEQ ID NO: 2583 - RNA, 100 nt, synthetic construct
  source 1..100: mol_type = other RNA
gccacacagacctccttgaatcaagaaagtcggttcatgaatactcccacggctaattagcgactttactagtcactgtcgtacattggccactcccagt

SEQ ID NO: 2584 - RNA, 101 nt, synthetic construct
  source 1..101: mol_type = other RNA
gccacacagacctccttgtagtaggaaagtcgtttccatgaatacatccacggctaatgaattcctttttcgttcactgtcgtacattggccactcccagt

SEQ ID NO: 2585 - RNA, 100 nt, synthetic construct
  source 1..100: mol_type = other RNA
gccacacagacctccttgaaaatggaaagtcctgtcattaatacatccacggctaatttgggactttactagtcactgtcgtacattggccactcccagt

SEQ ID NO: 2586 - RNA, 100 nt, synthetic construct
  source 1..100: mol_type = other RNA
gccacacagacctcctcatttgttgaaagtcctctcatgaatacatccacggctaatcattggctttactagtcactgtcgtacattggccactcccagt

SEQ ID NO: 2587 - RNA, 100 nt, synthetic construct
  source 1..100: mol_type = other RNA
gccacacagacctcaagcagctttgaaagtcctttcatgaatacctccacggctaatccaaggctttactagtcactgtcgtacattggccactcccagt

SEQ ID NO: 2588 - RNA, 100 nt, synthetic construct
  source 1..100: mol_type = other RNA
gccacatggaagtccttggcctttgaaagtcctttcatgaatcgatccacggctaatctacggctttactagtcactgtcgtacattggccactcccagt

SEQ ID NO: 2589 - RNA, 99 nt, synthetic construct
  source 1..99: mol_type = other RNA
gccacacagacctcctgtttacttgaaagtcctctcatgaatacatccacggtaattcaaggctttactagtcactgtcgtacattggccactcccagt

SEQ ID NO: 2590 - RNA, 100 nt, synthetic construct
  source 1..100: mol_type = other RNA
gccacatagggatccttggcctttgaaagtcctttcatgaatacatccacggcgaatgaattccttttgttatcactgtcgtacattggccactcccagt

SEQ ID NO: 2591 - RNA, 100 nt, synthetic construct
  source 1..100: mol_type = other RNA
gccacacagacctcagcctactttgaaagtcctttcatcaataccaccacggctaatgacagtacttactagtcactgtcgtacattggccactcccagt

SEQ ID NO: 2592 - RNA, 100 nt, synthetic construct
  source 1..100: mol_type = other RNA
gccacacagacctccttgtagggggaaagtccttgaatgaatacatccacggctaatgaattcctttactgtgttctgtcgtacattggccactcccagt

SEQ ID NO: 2593 - RNA, 99 nt, synthetic construct
  source 1..99: mol_type = other RNA
gccacacagacctccttgtatggggaaagtcccttgatgacacatccacggctaatgacgcggattactagtcactgtcgtacattggccactcccagt

SEQ ID NO: 2594 - RNA, 101 nt, synthetic construct
  source 1..101: mol_type = other RNA
gccacacagacctcctactgacttgaaagtcagtttcatgaatacatccacggctatctagctcctttactagtcactgtcgtacattggccactcccagt

SEQ ID NO: 2595 - RNA, 99 nt, synthetic construct
  source 1..99: mol_type = other RNA
gccacacagacctccttgttgatggaaagtcctttcatgaataccccacggctaatacagggctttactagtcactgtcgtacattggccactcccagt

SEQ ID NO: 2596 - RNA, 100 nt, synthetic construct
  source 1..100: mol_type = other RNA
gccacacagacctccttgttgaaggaaagtcctttcatgaatacttccacggctaatgaattccttttttgttcactgtcgtacattggccactcccagt

SEQ ID NO: 2597 - RNA, 100 nt, synthetic construct
  source 1..100: mol_type = other RNA
gccacacagacctccttgtaggacgaaagtactttcatgaatacatccatagatgctgaattcctttactagaatctgtcgtacattggccactcccagt

SEQ ID NO: 2598 - RNA, 100 nt, synthetic construct
  source 1..100: mol_type = other RNA
gccacataggggtccttggcctttgaaagtcttttcatgaattcatccacggctacgctagtcctttactagtcactgtcgtacattggccactcccagt

SEQ ID NO: 2599 - RNA, 100 nt, synthetic construct
  source 1..100: mol_type = other RNA
gccacacagaccaggtatgcctttgaaagtcaattcatgaatacttccacgactataaaactcctttactagtcactgtcgtacattggccactcccagt

SEQ ID NO: 2600 - RNA, 100 nt, synthetic construct
  source 1..100: mol_type = other RNA
gccacacagacctccttgataggcgaaagtcctttcatgaataactccacggctatcatactcctttactagtcactgtcgtacattggccactcccagt

SEQ ID NO: 2601 - RNA, 100 nt, synthetic construct
  source 1..100: mol_type = other RNA
gccacacagacctccttgtatgaggaaagtcctttccagaatacatccacggctaatgaattccttttagtgtcactgtcgtacattggccactcccagt

SEQ ID NO: 2602 - RNA, 100 nt, synthetic construct
  source 1..100: mol_type = other RNA
gccacacagacctcctgactaattgaaagtcctttcatgaatacacgcacggctcgtgacacggattactagtcactgtcgtacattggccactcccagt

SEQ ID NO: 2603 - RNA, 100 nt, synthetic construct
  source 1..100: mol_type = other RNA
gccacacagacctcctgatagattgaaagtcctttcatgcctacatccacggctaatatgcggctttactagtcactgtcgtacattggccactcccagt

SEQ ID NO: 2604 - RNA, 97 nt, synthetic construct
  source 1..97: mol_type = other RNA
gccacacagaccgggtacgcctttgaaagtatcatgaatacatccacggctaacgaattccttttgttttcactgtcgtacattggccactcccagt

SEQ ID NO: 2605 - RNA, 100 nt, synthetic construct
  source 1..100: mol_type = other RNA
gccacacagacctcctaacaggttgaaagtcctttcatgaatacatccacggctaatttgctactttactagtcactgtcgtacattggccactcccagt

SEQ ID NO: 2606 - RNA, 100 nt, synthetic construct
  source 1..100: mol_type = other RNA
gccacacagacctcctaaaatgttgaaagtgctttcaggaatacatccacggctaatgaattcctttttgtttcactgtcgtacattggccactcccagt

SEQ ID NO: 2607 - RNA, 100 nt, synthetic construct
  source 1..100: mol_type = other RNA
gccacacagaccattagcgcctttgaaagtcctttgatgcatacatccacggctatttaggtcctttactagtcactgtcgtacattggccactcccagt

SEQ ID NO: 2608 - RNA, 100 nt, synthetic construct
  source 1..100: mol_type = other RNA
gccacacagacctcctgataacttgaaagtcctttgatgcatacatccacggctaatctggggctttactagtcactgtcgtacattggccactcccagt

SEQ ID NO: 2609 - RNA, 100 nt, synthetic construct
  source 1..100: mol_type = other RNA
gccacatacaagtccttggcctttgaaagtcctttgatgcatacatccacggctaatttagtactttactagtcactgtcgtacattggccactcccagt

SEQ ID NO: 2610 - RNA, 100 nt, synthetic construct
  source 1..100: mol_type = other RNA
gccacaactccctcgaacgactttgaaagtcctttcatgaatagatccacggctaattataagctttacaccacactgtcgtcgaatggccactcccagt

SEQ ID NO: 2611 - RNA, 100 nt, synthetic construct
  source 1..100: mol_type = other RNA
gccacaactccctcgaacgactttgaaagtcctttcatgaatagatccacggctaattataagctttactagtcactgtcgtacattggccactcccagt

SEQ ID NO: 2612 - RNA, 100 nt, synthetic construct
  source 1..100: mol_type = other RNA
gccacaactccctccttggcaagtccaagtcctttcatgaatagatccacggctatgcctgtcctttacaccacactgtcgtcgaatggccactcccagt

SEQ ID NO: 2613 - RNA, 100 nt, synthetic construct
  source 1..100: mol_type = other RNA
gccacacagacctccttggcaagtccaagtcctttcatgaatagatccacggctatgcctgtcctttactagtcactgtcgtacattggccactcccagt

SEQ ID NO: 2614 - RNA, 100 nt, synthetic construct
  source 1..100: mol_type = other RNA
gccacacagacctccttggcaagtccaagtcctttcatgaatagatccacggctatgcctgtcctttacaccacactgtcgtcgaatggccactcccagt

SEQ ID NO: 2615 - RNA, 100 nt, synthetic construct
  source 1..100: mol_type = other RNA
gccacaactccctccttggcaagtccaagtcctttcatgaatagatccacggctatgcctgtcctttactagtcactgtcgtacattggccactcccagt

SEQ ID NO: 2616 - RNA, 99 nt, synthetic construct
  source 1..99: mol_type = other RNA
gccacaactccctccttgaaagcagaaagtcctttcgtgaatacatccacggcactgaatggtttgacaccacactgtcgtcgaatggccactcccagt

SEQ ID NO: 2617 - RNA, 99 nt, synthetic construct
  source 1..99: mol_type = other RNA
gccacacagacctccttgaaagcagaaagtcctttcgtgaatacatccacggcactgaatggtttgacaccacactgtcgtcgaatggccactcccagt

SEQ ID NO: 2618 - RNA, 100 nt, synthetic construct
  source 1..100: mol_type = other RNA
gccacaactccctcgcgcaactttgaaagtcctttcatgcatagatccacggctacataattccttttggagtcactgtcgtcgaatggccactcccagt

SEQ ID NO: 2619 - RNA, 100 nt, synthetic construct
  source 1..100: mol_type = other RNA
gccacacagacctcgcgcaactttgaaagtcctttcatgcatagatccacggctacataattccttttggagtcactgtcgtcgaatggccactcccagt

SEQ ID NO: 2620 - RNA, 100 nt, synthetic construct
  source 1..100: mol_type = other RNA
gccacaactccctcgcgcaactttgaaagtcctttcatgcatagatccacggctacataattccttttggagtcactgtcgtacattggccactcccagt

SEQ ID NO: 2621 - RNA, 100 nt, synthetic construct
  source 1..100: mol_type = other RNA
gccacaactccctcagcctactttgaaagtcctttcatcaataccaccacggctaatgacagtacttacaccacactgtcgtcgaatggccactcccagt

SEQ ID NO: 2622 - RNA, 100 nt, synthetic construct
  source 1..100: mol_type = other RNA
gccacacagacctcagcctactttgaaagtcctttcatcaataccaccacggctaatgacagtacttacaccacactgtcgtcgaatggccactcccagt

SEQ ID NO: 2623 - RNA, 100 nt, synthetic construct
  source 1..100: mol_type = other RNA
gccacaactccctcagcctactttgaaagtcctttcatcaataccaccacggctaatgacagtacttactagtcactgtcgtacattggccactcccagt

SEQ ID NO: 2624 - RNA, 100 nt, synthetic construct
  source 1..100: mol_type = other RNA
gccacaactccctcggacaactttgaaagtcctttcatgaatacaaccacggctcaacaattcgaaccgaccacactgtcgtcgaatggccactcccagt

SEQ ID NO: 2625 - RNA, 100 nt, synthetic construct
  source 1..100: mol_type = other RNA
gccacacagacctcggacaactttgaaagtcctttcatgaatacaaccacggctcaacaattcgaaccgaccacactgtcgtcgaatggccactcccagt

SEQ ID NO: 2626 - RNA, 100 nt, synthetic construct
  source 1..100: mol_type = other RNA
gccacaactccctccttgatggcggaaagtcctttcatgaatacatccacggctaaagaattcgatccaaccacactgtcgtcgaatggccactcccagt

SEQ ID NO: 2627 - RNA, 100 nt, synthetic construct
  source 1..100: mol_type = other RNA
gccacacagacctccttgatggcggaaagtcctttcatgaatacatccacggctaaagaattcgatccaaccacactgtcgtcgaatggccactcccagt

SEQ ID NO: 2628 - RNA, 100 nt, synthetic construct
  source 1..100: mol_type = other RNA
gccacaactccctcgactaactttgaaagtcctttcatgaatagctccacggctactagtgtcctttacaccacactgtcgtcgaatggccactcccagt

SEQ ID NO: 2629 - RNA, 100 nt, synthetic construct
  source 1..100: mol_type = other RNA
gccacacagacctcgactaactttgaaagtcctttcatgaatagctccacggctactagtgtcctttacaccacactgtcgtcgaatggccactcccagt

SEQ ID NO: 2630 - RNA, 100 nt, synthetic construct
  source 1..100: mol_type = other RNA
gccacaactccctcgactaactttgaaagtcctttcatgaatagctccacggctactagtgtcctttactagtcactgtcgtacattggccactcccagt

SEQ ID NO: 2631 - RNA, 100 nt, synthetic construct
  source 1..100: mol_type = other RNA
gccacaactccctcctatagagttgaaagtcctttcatgaatacatctacggctaatcgccgactttacaccacactgtcgtcgaatggccactcccagt

SEQ ID NO: 2632 - RNA, 97 nt, synthetic construct
  source 1..97: mol_type = other RNA
gccacaactccctcctctcaagttgaaagtcctttcatgaatatatccacggcttaattcctaatgaacacactgtcgtcgaatggccactcccagt

SEQ ID NO: 2633 - RNA, 100 nt, synthetic construct
  source 1..100: mol_type = other RNA
gccacaactccctcgcatcactttgaaagtactttcattaatacatccacggctacgtcgctcctttacaccacactgtcgtcgaatggccactcccagt

SEQ ID NO: 2634 - RNA, 99 nt, synthetic construct
  source 1..99: mol_type = other RNA
gccacaactccctcaaaacactttgaaagtcctttcatgaatgtctccacggcaatgaattcctgagatgcacactgtcgtcgaatggccactcccagt

SEQ ID NO: 2635 - RNA, 99 nt, synthetic construct
  source 1..99: mol_type = other RNA
gccacaactccctccttgataatcgaaagtcctttcatgaatacatccacgataatgaatagtaaaacaccacactgtcgtcgaatggccactcccagt

SEQ ID NO: 2636 - RNA, 100 nt, synthetic construct
  source 1..100: mol_type = other RNA
gccacaactccctccttgatagtggaaagtcctttcatgattacatccacggctagtaaaacactttacaccacactgtcgtcgaatggccactcccagt

SEQ ID NO: 2637 - RNA, 100 nt, synthetic construct
  source 1..100: mol_type = other RNA
gccacacagacctccttgatagtggaaagtcctttcatgattacatccacggctagtaaaacactttactagtcactgtcgtacattggccactcccagt

SEQ ID NO: 2638 - RNA, 100 nt, synthetic construct
  source 1..100: mol_type = other RNA
gccacaactccctcctagtaggttgaaagtcctttcattaataactccacggctaatgatctgagttacaccacactgtcgtcgaatggccactcccagt

SEQ ID NO: 2639 - RNA, 100 nt, synthetic construct
  source 1..100: mol_type = other RNA
gccacaactccctccttggcaacgctaagtcctttcatgaatacatccacggctcatgaattccttttgaagtcactgtcgtcgaatggccactcccagt

SEQ ID NO: 2640 - RNA, 100 nt, synthetic construct
  source 1..100: mol_type = other RNA
gccacacagacctccttggcaacgctaagtcctttcatgaatacatccacggctcatgaattccttttgaagtcactgtcgtacattggccactcccagt

SEQ ID NO: 2641 - RNA, 100 nt, synthetic construct
  source 1..100: mol_type = other RNA
gccacaactccctccttggcaacgctaagtcctttcatgaatacatccacggctcatgaattcgacctgaccacactgtcgtcgaatggccactcccagt

SEQ ID NO: 2642 - RNA, 98 nt, synthetic construct
  source 1..98: mol_type = other RNA
gccacaactccctcctacattattgaaagtcctttcatgaatccatccacggcatgaattcctattttacacactgtcgtcgaatggccactcccagt

SEQ ID NO: 2643 - RNA, 100 nt, synthetic construct
  source 1..100: mol_type = other RNA
gccacaactcccgaagccgcctttgaaagtcctttcatgaatagatccacggctaccgccctcctttacaccacactgtcgtcgaatggccactcccagt

SEQ ID NO: 2644 - RNA, 100 nt, synthetic construct
  source 1..100: mol_type = other RNA
gccacacagaccgaagccgcctttgaaagtcctttcatgaatagatccacggctaccgccctcctttactagtcactgtcgtacattggccactcccagt

SEQ ID NO: 2645 - RNA, 98 nt, synthetic construct
  source 1..98: mol_type = other RNA
gccacaactccctcgacacgctttgaaagtcctttcatgaatacatccacggcttgaattcggaatgaccacactgtcgtcgaatggccactcccagt

SEQ ID NO: 2646 - RNA, 100 nt, synthetic construct
  source 1..100: mol_type = other RNA
gccacaactccctccttggcggggttaagtcctttcatgaatacacccacggctaatccttggctttacaccacactgtcgtcgaatggccactcccagt

SEQ ID NO: 2647 - RNA, 101 nt, synthetic construct
  source 1..101: mol_type = other RNA
gccacaactccctccttgtaggaggaaagtcctttcattaatacatccacggctaatggaattcctcctctacacactgtcgtcgaatggccactcccagt

SEQ ID NO: 2648 - RNA, 100 nt, synthetic construct
  source 1..100: mol_type = other RNA
gccacaactccctccttgtaacgcgaaagtcctttcatgaatacatccacggctcatgacgaagattacaccacactgtcgtcgaatggccactcccagt

SEQ ID NO: 2649 - RNA, 100 nt, synthetic construct
  source 1..100: mol_type = other RNA
gccacacagacctccttgtaacgcgaaagtcctttcatgaatacatccacggctcatgacgaagattactagtcactgtcgtacattggccactcccagt

SEQ ID NO: 2650 - RNA, 100 nt, synthetic construct
  source 1..100: mol_type = other RNA
gccacaactccctcctatcaacttgaaagtcctttcatgcatacatccacggctaatgacgcagattacaccacactgtcgtcgaatggccactcccagt

SEQ ID NO: 2651 - RNA, 100 nt, synthetic construct
  source 1..100: mol_type = other RNA
gccacacagacctcctatcaacttgaaagtcctttcatgcatacatccacggctaatgacgcagattactagtcactgtcgtacattggccactcccagt

SEQ ID NO: 2652 - RNA, 98 nt, synthetic construct
  source 1..98: mol_type = other RNA
gccacaactccctcagccagctttgaaagtactttcatgaatacatccacggagtgaattcgacgcaaccacactgtcgtcgaatggccactcccagt

SEQ ID NO: 2653 - RNA, 100 nt, synthetic construct
  source 1..100: mol_type = other RNA
gccacaactcccaggatcgcctttgaaagtccttccctgaatacatccacggctacgacagtcctttacaccacactgtcgtcgaatggccactcccagt

SEQ ID NO: 2654 - RNA, 100 nt, synthetic construct
  source 1..100: mol_type = other RNA
gccacaactccctcctctcgagttgaaagtcctttcatgaatacatccacggctacggatagagcttacaccacactgtcgtcgaatggccactcccagt

SEQ ID NO: 2655 - RNA, 100 nt, synthetic construct
  source 1..100: mol_type = other RNA
gccacacagacctcctctcgagttgaaagtcctttcatgaatacatccacggctacggatagagcttactagtcactgtcgtacattggccactcccagt

SEQ ID NO: 2656 - RNA, 100 nt, synthetic construct
  source 1..100: mol_type = other RNA
gccacaactccctcctctcatcttgaaagtcgactttcatgaatacatccacggaatgaattccttttgtaatcactgtcgtcgaatggccactcccagt

SEQ ID NO: 2657 - RNA, 100 nt, synthetic construct
  source 1..100: mol_type = other RNA
gccacaactccctccttgataggcgaaagtcctttcatgaataactccacggctatcatactcctttacaccacactgtcgtcgaatggccactcccagt

SEQ ID NO: 2658 - RNA, 99 nt, synthetic construct
  source 1..99: mol_type = other RNA
gccacaactccctcctctaaagttgaaagtcctttcatgaatacatccacgataataactggctttacaccacactgtcgtcgaatggccactcccagt

SEQ ID NO: 2659 - RNA, 99 nt, synthetic construct
  source 1..99: mol_type = other RNA
gccacacagacctcctctaaagttgaaagtcctttcatgaatacatccacgataataactggctttactagtcactgtcgtacattggccactcccagt

SEQ ID NO: 2660 - RNA, 99 nt, synthetic construct
  source 1..99: mol_type = other RNA
gccacaactccctcctgatatgttgaaagtcctttcctgaatacatccacggctacgacaagaattacaccacactgtcgtcgaatggccactcccagt

SEQ ID NO: 2661 - RNA, 99 nt, synthetic construct
  source 1..99: mol_type = other RNA
gccacacagacctcctgatatgttgaaagtcctttcctgaatacatccacggctacgacaagaattactagtcactgtcgtacattggccactcccagt

SEQ ID NO: 2662 - RNA, 101 nt, synthetic construct
  source 1..101: mol_type = other RNA
gccacaactccctcctacaaacttgaaagtcctttcatgaatacaaccacggctaattgacggagattacaccacactgtcgtcgaatggccactcccagt

SEQ ID NO: 2663 - RNA, 101 nt, synthetic construct
  source 1..101: mol_type = other RNA
gccacacagacctcctacaaacttgaaagtcctttcatgaatacaaccacggctaattgacggagattactagtcactgtcgtacattggccactcccagt

SEQ ID NO: 2664 - RNA, 98 nt, synthetic construct
  source 1..98: mol_type = other RNA
gccacaactccctcctgaatgattgaaagtcctttcatgaatacatccacggcatgatctgagttacaccacactgtcgtcgaatggccactcccagt

SEQ ID NO: 2665 - RNA, 99 nt, synthetic construct
  source 1..99: mol_type = other RNA
gccacaactccctcctcatgagttgaaagtcctttcatgaatacatccacggacttgaattcctggaatgcacactgtcgtcgaatggccactcccagt

SEQ ID NO: 2666 - RNA, 100 nt, synthetic construct
  source 1..100: mol_type = other RNA
gccacaactccctccttgtaaggagaaagtcctttcatgaatacatccacggcggctgaattcgcgctgaccacactgtcgtcgaatggccactcccagt

SEQ ID NO: 2667 - RNA, 99 nt, synthetic construct
  source 1..99: mol_type = other RNA
gccacaactccctcctcattgattgaaagtcctttcatgaataccccacggcggcgatattcctttacaccacactgtcgtcgaatggccactcccagt

SEQ ID NO: 2668 - RNA, 99 nt, synthetic construct
  source 1..99: mol_type = other RNA
gccacacagacctcctcattgattgaaagtcctttcatgaataccccacggcggcgatattcctttactagtcactgtcgtacattggccactcccagt

SEQ ID NO: 2669 - RNA, 100 nt, synthetic construct
  source 1..100: mol_type = other RNA
gccacaactccctccttgataatcgaaagtcctttcatgaatacatccacggctcttgacgatagttacaccacactgtcgtcgaatggccactcccagt

SEQ ID NO: 2670 - RNA, 100 nt, synthetic construct
  source 1..100: mol_type = other RNA
gccacacagacctccttgataatcgaaagtcctttcatgaatacatccacggctcttgacgatagttactagtcactgtcgtacattggccactcccagt

SEQ ID NO: 2671 - RNA, 101 nt, synthetic construct
  source 1..101: mol_type = other RNA
gccacaactccctccttgatggcggaaagtcccttcatgaatactatccacggctctacaattcctttactggagtctgtcgtcgaatggccactcccagt

SEQ ID NO: 2672 - RNA, 100 nt, synthetic construct
  source 1..100: mol_type = other RNA
gccacaactccctcctccaagattgaaagtcctttcaagaatacatccacggcggttacattcctttacaccacactgtcgtcgaatggccactcccagt

SEQ ID NO: 2673 - RNA, 100 nt, synthetic construct
  source 1..100: mol_type = other RNA
gccacacagacctcctccaagattgaaagtcctttcaagaatacatccacggcggttacattcctttactagtcactgtcgtacattggccactcccagt

SEQ ID NO: 2674 - RNA, 100 nt, synthetic construct
  source 1..100: mol_type = other RNA
gccacaactccctcctgacatattgaaagtcctttcatcaatacatccacggcgtgcatattcctttacaccacactgtcgtcgaatggccactcccagt

SEQ ID NO: 2675 - RNA, 100 nt, synthetic construct
  source 1..100: mol_type = other RNA
gccacacagacctcctgacatattgaaagtcctttcatcaatacatccacggcgtgcatattcctttactagtcactgtcgtacattggccactcccagt

SEQ ID NO: 2676 - RNA, 100 nt, synthetic construct
  source 1..100: mol_type = other RNA
gccacaactccctcctgatatgttgaaagtcctttcctgaatacattcacggctattcatctcctttacaccacactgtcgtcgaatggccactcccagt

SEQ ID NO: 2677 - RNA, 100 nt, synthetic construct
  source 1..100: mol_type = other RNA
gccacacagacctcctgatatgttgaaagtcctttcctgaatacattcacggctattcatctcctttactagtcactgtcgtacattggccactcccagt

SEQ ID NO: 2678 - RNA, 100 nt, synthetic construct
  source 1..100: mol_type = other RNA
gccacaactccctcctctattattgaaagtcctttcattaatacatccacggctaattgttggctttacaccacactgtcgtcgaatggccactcccagt

SEQ ID NO: 2679 - RNA, 100 nt, synthetic construct
  source 1..100: mol_type = other RNA
gccacacagacctcctctattattgaaagtcctttcattaatacatccacggctaattgttggctttactagtcactgtcgtacattggccactcccagt

SEQ ID NO: 2680 - RNA, 100 nt, synthetic construct
  source 1..100: mol_type = other RNA
gccacaactccctcctaacatcttgaaagtcctttcatgaatacatccacggctttggaattcggtccgaccacactgtcgtcgaatggccactcccagt

SEQ ID NO: 2681 - RNA, 100 nt, synthetic construct
  source 1..100: mol_type = other RNA
gccacaactccctcctctcaggttgaaagtcctttcatggatacatccacggcttccgatgcatattacaccacactgtcgtcgaatggccactcccagt

SEQ ID NO: 2682 - RNA, 100 nt, synthetic construct
  source 1..100: mol_type = other RNA
tccatacccccatagcgtacgaaacagcgtttacttccacgtagacgaactcctggcggggctcagccatgctattagtaagttcacctgatagtcgaca

SEQ ID NO: 2683 - RNA, 100 nt, synthetic construct
  source 1..100: mol_type = other RNA
tcgcctccccctcgccgtaccagccagcgggttcttccctgcggtcgaactcctggcggggctcagccatatacgatcaaagttcacctgatagtcgaca

SEQ ID NO: 2684 - RNA, 100 nt, synthetic construct
  source 1..100: mol_type = other RNA
tcgcctccccctcgccgtaccagccagcgggttcttccctgcggtcgaactcctggcggggctcagccatatacgatcaaaggcaacctgagcatcgaca

SEQ ID NO: 2685 - RNA, 100 nt, synthetic construct
  source 1..100: mol_type = other RNA
tcctcggccccaagaagtacgtgggagcgtgctaccgcatcacttcgaactcctggcggggctcagccataagctctcaaagttcacctgatagtcgaca

SEQ ID NO: 2686 - RNA, 113 nt, synthetic construct
  source 1..113: mol_type = other RNA
ccctggtgtgccctctgatgttttttaggggattctacagcaggactgagcaatcttgtggtcagcaatatttgcatactacgcagcattgggatacagtgtgaaaagcagca

SEQ ID NO: 2687 - RNA, 113 nt, synthetic construct
  source 1..113: mol_type = other RNA
ccctggtgtgccctctgatgttttttaggggattctacagcaggactgagcaatggagtggtcagcaatatttgcatactacgcagcattgggatacagtgtgaaaagcagca

SEQ ID NO: 2688 - RNA, 113 nt, synthetic construct
  source 1..113: mol_type = other RNA
ccctggtgtgccctctgatgttttttaggggattctacagcacgactgagcagtgcgttagtcagccatctttgcatactacgcagcattgggatacagtgtgaaaagcagca

SEQ ID NO: 2689 - RNA, 113 nt, synthetic construct
  source 1..113: mol_type = other RNA
ccctggtgtgccctctgatgttttttaggggattctacagcattactcagcagtgcgttagtcagcactctttgcatactacgcagcattgggatacagtgtgaaaagcagca

SEQ ID NO: 2690 - RNA, 113 nt, synthetic construct
  source 1..113: mol_type = other RNA
ccctggtgtgccctctgatgttttttaggggattctacagcacgactgagcagtgcgttagtcggcaatctttgcatactacgcagcattgggatacagtgtgaaaagcagca

SEQ ID NO: 2691 - RNA, 113 nt, synthetic construct
  source 1..113: mol_type = other RNA
ccctggtgtgccctctgatgttttttaggggattctacagcaatactcagcagtgcgtgagtcagcaatctttgcatactacgcagcattgggatacagtgtgaaaagcagca

SEQ ID NO: 2692 - RNA, 113 nt, synthetic construct
  source 1..113: mol_type = other RNA
ccctggtgtgccctctgatgttttttaggggattctacagcacgactgagcagtgcgctagtcggcaatctttgcatactacgcagcattgggatacagtgtgaaaagcagca

SEQ ID NO: 2693 - RNA, 113 nt, synthetic construct
  source 1..113: mol_type = other RNA
ccctggtgtgccctctgatgttttttaggggattctacagcacgactgagcagtgcgctagtcagcaatatttgcatactacgcagcattgggatacagtgtgaaaagcagca

SEQ ID NO: 2694 - RNA, 113 nt, synthetic construct
  source 1..113: mol_type = other RNA
ccctggtgtgccctctgatgttttttaggggattctacagcaatactcagcagtgcgctagtcagccatctttgcatactacgcagcattgggatacagtgtgaaaagcagca

SEQ ID NO: 2695 - RNA, 113 nt, synthetic construct
  source 1..113: mol_type = other RNA
ccctggtgtgccctctgatgttttttaggggattctacagcatgactgagcagtcccgtagtcggcaatctttgcatactacgcagcattgggatacagtgtgaaaagcagca

SEQ ID NO: 2696 - RNA, 113 nt, synthetic construct
  source 1..113: mol_type = other RNA
ccctggtgtgccctctgatgttttttaggggattctacagcaatactcagcagttccgtagtcagcaatatttgcatactacgcagcattgggatacagtgtgaaaagcagca

SEQ ID NO: 2697 - RNA, 113 nt, synthetic construct
  source 1..113: mol_type = other RNA
ccctggtgtgccctctgatgttttttaggggattctacagcattactcagcagtcccgtagtcagcaatatttgcatactacgcagcattgggatacagtgtgaaaagcagca

SEQ ID NO: 2698 - RNA, 113 nt, synthetic construct
  source 1..113: mol_type = other RNA
ccctggtgtgccctctgatgttttttaggggattctacagcattactcagcaaatccgtagtcagaaatctttgcatactacgcagcattgggatacagtgtgaaaagcagca

SEQ ID NO: 2699 - RNA, 113 nt, synthetic construct
  source 1..113: mol_type = other RNA
ccctggtgtgccctctgatgttttttaggggattctagagaggtactgtgccatcccgtggtcggccatctttgcatactacgcagcattgggatacagtgtgaaaagcagca

SEQ ID NO: 2700 - RNA, 113 nt, synthetic construct
  source 1..113: mol_type = other RNA
ccctggtgtgccctctgatgttttttaggggattctagagcaggacggtgcagtcccgtggtcggcaatctttgcatactacgcagcattgggatacagtgtgaaaagcagca

SEQ ID NO: 2701 - RNA, 113 nt, synthetic construct
  source 1..113: mol_type = other RNA
ccctggtgtgccctctgatgttttttaggggattctacaggaggactgggcagtcccgtggtcgcccttctttgcatactacgcagcattgggatacagtgtgaaaagcagca

SEQ ID NO: 2702 - RNA, 113 nt, synthetic construct
  source 1..113: mol_type = other RNA
ccctggtgtgccctctgatgttttttaggggattctacagcggtactgtgcaaatccgtggtcggtcatctttgcatactacgcagcattgggatacagtgtgaaaagcagca

SEQ ID NO: 2703 - RNA, 113 nt, synthetic construct
  source 1..113: mol_type = other RNA
ccctggtgtgccctctgatgttttttaggggattctacggcaggactggggaaatccgtggtcggccatctttgcatactacgcagcattgggatacagtgtgaaaagcagca

SEQ ID NO: 2704 - RNA, 113 nt, synthetic construct
  source 1..113: mol_type = other RNA
ccctggtgtgccctctgatgttttttaggggattctacagcggtactgcgcagtcccgtggtggtccatctttgcatactacgcagcattgggatacagtgtgaaaagcagca

SEQ ID NO: 2705 - RNA, 113 nt, synthetic construct
  source 1..113: mol_type = other RNA
ccctggtgtgccctctgatgttttttaggggattctatagcaggaatgaggaaatccgtggtcggcaatctttgcatactacgcagcattgggatacagtgtgaaaagcagca

SEQ ID NO: 2706 - RNA, 113 nt, synthetic construct
  source 1..113: mol_type = other RNA
ccctggtgtgccctctgatgttttttaggggattctacagcagtactcaggaaatccgtggtcggatatctttgcatactacgcagcattgggatacagtgtgaaaagcagca

SEQ ID NO: 2707 - RNA, 113 nt, synthetic construct
  source 1..113: mol_type = other RNA
ccctggtgtgccctctgatgttttttaggggattctaaagcaggagtgagcagatccgtggtcggcaatctttgcatactacgcagcattgggatacagtgtgaaaagcagca

SEQ ID NO: 2708 - RNA, 113 nt, synthetic construct
  source 1..113: mol_type = other RNA
ccctggtgtgccctctgatgttttttaggggattctacaggtgtactgtgaaatcccgtggtcataaatctttgcatactacgcagcattgggatacagtgtgaaaagcagca

SEQ ID NO: 2709 - RNA, 113 nt, synthetic construct
  source 1..113: mol_type = other RNA
ccctggtgtgccctctgatgttttttaggggattctacagcagtactgtccagtcccgtggtcgtaaatctttgcatactacgcagcattgggatacagtgtgaaaagcagca

SEQ ID NO: 2710 - RNA, 113 nt, synthetic construct
  source 1..113: mol_type = other RNA
ccctggtgtgccctctgatgttttttaggggattctacatcaggactgagcttttccgaggtcggctatctttgcatactacgcagcattgggatacagtgtgaaaagcagca

SEQ ID NO: 2711 - RNA, 113 nt, synthetic construct
  source 1..113: mol_type = other RNA
ccctggtgtgccctctgatgttttttaggggattctacatcagtactgggcagttccgtagtcggcaatctttgcatactacgcagcattgggatacagtgtgaaaagcagca

SEQ ID NO: 2712 - RNA, 113 nt, synthetic construct
  source 1..113: mol_type = other RNA
ccctggtgtgccctctgatgttttttaggggattctacagcagtactgggcagtgcgctagtcggcactctttgcatactacgcagcattgggatacagtgtgaaaagcagca

SEQ ID NO: 2713 - RNA, 113 nt, synthetic construct
  source 1..113: mol_type = other RNA
ccctggtgtgccctctgatgttttttaggggattctacagcaatactcaccagtcccgatgtaagcaatctttgcatactacgcagcattgggatacagtgtgaaaagcagca

SEQ ID NO: 2714 - RNA, 113 nt, synthetic construct
  source 1..113: mol_type = other RNA
ccctggtgtgccctctgatgttttttaggggattctacggcagtactgtgaaatcccgatgtcggcaatctttgcatactacgcagcattgggatacagtgtgaaaagcagca

SEQ ID NO: 2715 - RNA, 113 nt, synthetic construct
  source 1..113: mol_type = other RNA
ccctggtgtgccctctgatgttttttaggggattctaccgcaggacggagctatcccgagttaggcaatctttgcatactacgcagcattgggatacagtgtgaaaagcagca

SEQ ID NO: 2716 - RNA, 113 nt, synthetic construct
  source 1..113: mol_type = other RNA
ccctggtgtgccctctgatgttttttaggggattctacggcatgactgatcagtcccgtggtcggaccccgatgcatactacgcagcattgggatacagtgtgaaaagcagca

SEQ ID NO: 2717 - RNA, 113 nt, synthetic construct
  source 1..113: mol_type = other RNA
ccctggtgtgccctctgatgttttttaggggattctacggcaagactgggcagtcccgtggtcggacccccgtgcatactacgcagcattgggatacagtgtgaaaagcagca

SEQ ID NO: 2718 - RNA, 113 nt, synthetic construct
  source 1..113: mol_type = other RNA
ccctggtgtgccctctgatgttttttaggggattctacggcaggactgggctttcccgtggtcggacctccgtgcatactacgcagcattgggatacagtgtgaaaagcagca

SEQ ID NO: 2719 - RNA, 113 nt, synthetic construct
  source 1..113: mol_type = other RNA
ccctggtgtgccctctgatgttttttaggggattctacggtaggactgatcagtcccgtggtcgaaccacgttgcatactacgcagcattgggatacagtgtgaaaagcagca

SEQ ID NO: 2720 - RNA, 113 nt, synthetic construct
  source 1..113: mol_type = other RNA
ccctggtgtgccctctgatgttttttaggggattctacggcaagactgagcagtcccgtggtggaaccccgttgcatactacgcagcattgggatacagtgtgaaaagcagca

SEQ ID NO: 2721 - RNA, 113 nt, synthetic construct
  source 1..113: mol_type = other RNA
ccctggtgtgccctctgatgttttttaggggatcctacggcagtactgatcaaatccgtggtggcaccccgttgcatactacgcagcattgggatacagtgtgaaaagcagca

SEQ ID NO: 2722 - RNA, 113 nt, synthetic construct
  source 1..113: mol_type = other RNA
ccctggtgtgccctctgatgttttttaggggattctacagcaggactgaccagttccgtggtggcacctccgtgcatactacgcagcattgggatacagtgtgaaaagcagca

SEQ ID NO: 2723 - RNA, 113 nt, synthetic construct
  source 1..113: mol_type = other RNA
ccctggtgtgccctctgatgttttttaggggattctacggcagtactgagaaatcccgtggtggcaccccgttgcatactacgcagcattgggatacagtgtgaaaagcagca

SEQ ID NO: 2724 - RNA, 113 nt, synthetic construct
  source 1..113: mol_type = other RNA
ccctggtgtgccctctgatgttttttaggggattctacagcagtcctgaccagtcccgtggtcgtacctccgtgcatactacgcagcattgggatacagtgtgaaaagcagca

SEQ ID NO: 2725 - RNA, 113 nt, synthetic construct
  source 1..113: mol_type = other RNA
ccctggtgtgccctctgatgttttttaggggcttctacagcaggactgatcaaatccgtggtggaaccccgttgcatactacgcagcattgggatacagtgtgaaaagcagca

SEQ ID NO: 2726 - RNA, 113 nt, synthetic construct
  source 1..113: mol_type = other RNA
ccctggtgtgccctctgatgttttttaggggattctacggcagtactgagacatcccgtggtggcacccccgtgcatactacgcagcattgggatacagtgtgaaaagcagca

SEQ ID NO: 2727 - RNA, 113 nt, synthetic construct
  source 1..113: mol_type = other RNA
ccctggtgtgccctctgatgttttttaggggattctaccgcagtactcaccagtcgccgtgtcgtcaatctttgcatactacgcagcattgggatacagtgtgaaaagcagca

SEQ ID NO: 2728 - RNA, 113 nt, synthetic construct
  source 1..113: mol_type = other RNA
ccctggtgtgccctctgatgttttttaggggattctaccgcagtactcaccagtcgccgtgtcggcaatctttgcatactacgcagcattgggatacagtgtgaaaagcagca

SEQ ID NO: 2729 - DNA, 100 bp, synthetic construct
  source 1..100: mol_type = other DNA
atcttgaatgtggttgttttgccggcaccattcaacagttggaggccaaagcactctccagggcgaactcggacaaaaatgctgtccactgctgggctgg

SEQ ID NO: 2730 - DNA, 100 bp, synthetic construct
  source 1..100: mol_type = other DNA
atcttgaatgtggttgttttgccggcaccattcactcccaggaggcgcactaactctccagggcgaactcggacacacagcctgtgattaactgggctgg

SEQ ID NO: 2731 - DNA, 100 bp, synthetic construct
  source 1..100: mol_type = other DNA
atcttgaatgtggttgttttgccggcaccattcactccaatcacgccaaagcactctccagggcgaactcggacacacaagacagccactgctgggctgg

SEQ ID NO: 2732 - DNA, 100 bp, synthetic construct
  source 1..100: mol_type = other DNA
atcttgaatgtggttgttttgccggcaccagtataacccaggaggccaaagcactctccagggcgaactcggacagctccactgtccactgctgggctgg

SEQ ID NO: 2733 - DNA, 100 bp, synthetic construct
  source 1..100: mol_type = other DNA
atcttgaatgtggttgttttgccggcttggcacactcccaggaggccaaagcactctccagggcgaacttggacagtatgactgtccactgctgggctgg

SEQ ID NO: 2734 - DNA, 100 bp, synthetic construct
  source 1..100: mol_type = other DNA
atcttgaatgtggttgttttgccggcaccattcactccgcatacgccaaagcactctccagggcgaacttggacacacaaaggggccactgctgggctgg

SEQ ID NO: 2735 - DNA, 100 bp, synthetic construct
  source 1..100: mol_type = other DNA
atcttgaatgtggttgttttgccggcaccaactgtacccaggaggccaaagcactctccagggcgaacttggacacaatcttggtccactgctgggctgg

SEQ ID NO: 2736 - DNA, 98 bp, synthetic construct
  source 1..98: mol_type = other DNA
atcttgaatgtggttgttttgccggcaccattcactcccaggaggcgctccaactctccagtgagaactcggaccacagcctcagagatctgggctgg

SEQ ID NO: 2737 - DNA, 99 bp, synthetic construct
  source 1..99: mol_type = other DNA
atcttgaatgtggttgttttgccggctatttacactcccaggaggccaaagcactctccagtgagaactcggactttctactgtccactgctgggctgg

SEQ ID NO: 2738 - DNA, 99 bp, synthetic construct
  source 1..99: mol_type = other DNA
atcttgaatgtggttgttttgccggcaccacgaaggcccaggaggccaaagcactctccagtgagaactcggaccacagcgaccgaactgctgggctgg

SEQ ID NO: 2739 - DNA, 99 bp, synthetic construct
  source 1..99: mol_type = other DNA
atcttgaatgtggttgttttgccggcaccattcactcccaggtttttcaagcactctccagtgagaactcggaccacaaagacgccactgctgggctgg

SEQ ID NO: 2740 - DNA, 100 bp, synthetic construct
  source 1..100: mol_type = other DNA
atcttgaatgtggttgttttgccggcaccattcactcccaggaggcgcaccaactctccagtgagaactcggacacacagcctgtaatgatctgggctgg

SEQ ID NO: 2741 - DNA, 100 bp, synthetic construct
  source 1..100: mol_type = other DNA
atcttgaatgtggtacagttgccggctagggccactcccaggaggccaaagcactctccagtgagaactcggacagtaatgctgtccacacaagggctgg

SEQ ID NO: 2742 - DNA, 100 bp, synthetic construct
  source 1..100: mol_type = other DNA
atcttgaatgtggttgttttgccggcacacgactctcccaggaggccaaagcactctccagtgagaactcggacacacaatggacccactgctgggctgg

SEQ ID NO: 2743 - DNA, 100 bp, synthetic construct
  source 1..100: mol_type = other DNA
atcttgaatgtggttgttttgccggctatggccactcccaggaggccaaagcactctccagggcgagcttggtcataacaagagtccactgctgggctgg

SEQ ID NO: 2744 - DNA, 100 bp, synthetic construct
  source 1..100: mol_type = other DNA
atcttgaatgtggttgttttgccggcaccattcaacgagtggaggccaaagcactctccagggcgagcttggtagtctcgcctgtccactgctgggctgg

SEQ ID NO: 2745 - DNA, 100 bp, synthetic construct
  source 1..100: mol_type = other DNA
atcttgaatgtggttgttttgccggcaccagtgttccccaggaggccaaagcactctccagggcgagcttggtcatacagcatttgaactgctgggctgg

SEQ ID NO: 2746 - DNA, 100 bp, synthetic construct
  source 1..100: mol_type = other DNA
atcttgaatgtggttgttttgccggcttagcacactcccaggaggccaaagcactctccagggcgagcttggtcaaagttactgtccactgctgggctgg

SEQ ID NO: 2747 - DNA, 100 bp, synthetic construct
  source 1..100: mol_type = other DNA
atcttgaatgtggttgttttgccggcacacgcttctcccaggaggccaaagcactctccagggcgagcttggtcagttcaactgtccactgctgggctgg

SEQ ID NO: 2748 - DNA, 100 bp, synthetic construct
  source 1..100: mol_type = other DNA
atcttgaatgtggttgttttgccggcaccattcactcccaggaggcgtcttaactctccagggcgagcttggtcacacagcctgtccacgggaaagctgg

SEQ ID NO: 2749 - DNA, 100 bp, synthetic construct
  source 1..100: mol_type = other DNA
atcttgaatgtggttgttttgccggcaccattcactccgtcccagccaaagcactctccagggcgagcttggtcacacagcgacgaaactgctgggctgg

SEQ ID NO: 2750 - DNA, 100 bp, synthetic construct
  source 1..100: mol_type = other DNA
atcttgaatgtggttgttttgccggcaccaagtggacccaggaggccaaagcactctccagggcgagcttggtcacaaacggggtccactgctgggctgg

SEQ ID NO: 2751 - DNA, 100 bp, synthetic construct
  source 1..100: mol_type = other DNA
atcttgaatgtggttgttttgccggcaccattcactcccaggaggcattaaaactctccaggacgaactcggacacacaggctgtccacgattaagctgg

SEQ ID NO: 2752 - DNA, 100 bp, synthetic construct
  source 1..100: mol_type = other DNA
atcttgaatgtggttgttttgccggcaccaaacccacccaggaggccaaagcactctccaggacgaactcggacaattctactgtccactgctgggctgg

SEQ ID NO: 2753 - DNA, 100 bp, synthetic construct
  source 1..100: mol_type = other DNA
atcttgaatgtggttgttttgccggcaccattcactcccaggtgagataagcactctccaggacgaactcggacacacaggctacattgtgctgggctgg

SEQ ID NO: 2754 - DNA, 100 bp, synthetic construct
  source 1..100: mol_type = other DNA
atcttgaatgtggttgttttgccggcttttaccactcccaggaggccaaagcactctccaggacgaactcggacaacgttgctgtccactgctgggctgg

SEQ ID NO: 2755 - DNA, 100 bp, synthetic construct
  source 1..100: mol_type = other DNA
atcttgaatgtggttgttttgccggcaccattcactcccatacttacaaagcactctccaggacgaactcggacacacataattaccactgctgggctgg

SEQ ID NO: 2756 - DNA, 100 bp, synthetic construct
  source 1..100: mol_type = other DNA
atcttgaatgtggttgttttgccggcaccattcactcccaggaggcgtcctaactctccagggcgatcttggacacacaacctgtccacacgaccgctgg

SEQ ID NO: 2757 - DNA, 100 bp, synthetic construct
  source 1..100: mol_type = other DNA
atcttgaatgtggttgttttgccggcacgttaccctcccaggaggccaaagcactctccagggcgatcttggacagttacactgtccactgctgggctgg

SEQ ID NO: 2758 - DNA, 100 bp, synthetic construct
  source 1..100: mol_type = other DNA
atcttgaatgtggttgttttgccggcaccattcactcccaggagattcttgcactctccagggcgatcttggacacacaacctcatagatgctgggctgg

SEQ ID NO: 2759 - DNA, 100 bp, synthetic construct
  source 1..100: mol_type = other DNA
atcttgaatgtggttgttttgccggctaaaaccactcccaggaggccaaagcactctccagggcgatcttggacacaactcgggtccactgctgggctgg

SEQ ID NO: 2760 - DNA, 100 bp, synthetic construct
  source 1..100: mol_type = other DNA
atcttgaatgtggttgttttgccggcaccattcactcccacttctacaaagcactctccagggcgatcttggacacacaacctttaaaatgctgggctgg

SEQ ID NO: 2761 - DNA, 100 bp, synthetic construct
  source 1..100: mol_type = other DNA
atcttgaatgtggttgttttgccggcaccagcccaacccaggaggccaaagcactctccagggcgatcttggacagcgttgctgtccactgctgggctgg

SEQ ID NO: 2762 - DNA, 85 bp, synthetic construct
  source 1..85: mol_type = other DNA
tagacatgggtatggcctctaatttgtaggccccagcagcttcagtcccttactcgtcgtaccagagcacagccttatgcacggc

SEQ ID NO: 2763 - DNA, 89 bp, synthetic construct
  source 1..89: mol_type = other DNA
tagacatgggtatggcctctaatttgtaggccccagcagcttcagtcccttactcgtcgtaccagagcacagccagtcgtatgcacggc

SEQ ID NO: 2764 - DNA, 85 bp, synthetic construct
  source 1..85: mol_type = other DNA
tagacatgggtatggggcagtattcccatggccccagcagcttcagtccttactcgtcgatggtcataagttccttatgcacggc

SEQ ID NO: 2765 - DNA, 85 bp, synthetic construct
  source 1..85: mol_type = other DNA
tagacatgggtcacaagtctaaaaacaatactacccagcagcttcagtccacctcgtcgatgacaacgacagccttatgcacggc

SEQ ID NO: 2766 - DNA, 85 bp, synthetic construct
  source 1..85: mol_type = other DNA
tagacatgggtccatagtctaatccatggctaccccagcagcttgtccctttctcgtcaccagacagcacagccttatgcacggc

SEQ ID NO: 2767 - DNA, 85 bp, synthetic construct
  source 1..85: mol_type = other DNA
tagacatgggtatataaggtaaaaacatgtacgccccagccttcagtcccttctcgtcgaactattgcacagccttatgcacggc

SEQ ID NO: 2768 - DNA, 85 bp, synthetic construct
  source 1..85: mol_type = other DNA
tagacatgggtatggcctctaatttgtaggccccagcagcttcagtcccttactcgtcgatggtcagcacagcgaataccacggc

SEQ ID NO: 2769 - DNA, 113 bp, synthetic construct
  source 1..113: mol_type = other DNA
ccctggtgtgccctctgatgttttttaggggattctacaggaggactgggcagtcccgtggtcgcccttctttgcatactacgcagcattgggatacagtgtgaaaagcagca

SEQ ID NO: 2770 - DNA, 113 bp, synthetic construct
  source 1..113: mol_type = other DNA
ccctggtgtgccctctgatgttttttaggggattctacagcagtactgtccagtcccgtggtcgtaaatctttgcatactacgcagcattgggatacagtgtgaaaagcagca

SEQ ID NO: 2771 - DNA, 113 bp, synthetic construct
  source 1..113: mol_type = other DNA
ccctggtgtgccctctgatgttttttaggggattctacagcacgactgagcagtgcgttagtcggcaatctttgcatactacgcagcattgggatacagtgtgaaaagcagca

SEQ ID NO: 2772 - DNA, 92 bp, synthetic construct
  source 1..92: mol_type = other DNA
tgtggttgttttgccggcaccatagtgagccaggaggccaaagcactctccagtgagaactcggacacacagcctgagtgagctgggctgga

SEQ ID NO: 2773 - DNA, 92 bp, synthetic construct
  source 1..92: mol_type = other DNA
tgtggttgttttgccggcaccatagtgagccaggaggccaaagctgagagcagtgagaactcggacacacagcctgagtgagctgggctgga

SEQ ID NO: 2774 - DNA, 92 bp, synthetic construct
  source 1..92: mol_type = other DNA
tgtggttgttttgccggcaccatagtgagccaggaggccaaaggtgagaccagtgagaactcggacacacagcctgagtgagctgggctgga

SEQ ID NO: 2775 - DNA, 92 bp, synthetic construct
  source 1..92: mol_type = other DNA
tgtggttgttttgccggcaccatagtgagccaggaggccaaatttgagtccagtgagaactcggacacacagcctgagtgagctgggctgga

SEQ ID NO: 2776 - DNA, 92 bp, synthetic construct
  source 1..92: mol_type = other DNA
tgtggttgttttgccggcaccatagtgagccaggaggccaattttgactccagtgagaactcggacacacagcctgagtgagctgggctgga

SEQ ID NO: 2777 - DNA, 92 bp, synthetic construct
  source 1..92: mol_type = other DNA
tgtggttgttttgccggcaccatagtgagccaggaggccatttttgtctccagtgagaactcggacacacagcctgagtgagctgggctgga

SEQ ID NO: 2778 - DNA, 92 bp, synthetic construct
  source 1..92: mol_type = other DNA
tgtggttgttttgccggcaccatagtgagccaggaggccttttttctctccagtgagaactcggacacacagcctgagtgagctgggctgga

SEQ ID NO: 2779 - DNA, 92 bp, synthetic construct
  source 1..92: mol_type = other DNA
tgtggttgttttgccggcaccatagtgagccaggaggcgttttaactctccagtgagaactcggacacacagcctgagtgagctgggctgga

SEQ ID NO: 2780 - DNA, 92 bp, synthetic construct
  source 1..92: mol_type = other DNA
tgtggttgttttgccggcaccatagtgagccaggaggggttttcactctccagtgagaactcggacacacagcctgagtgagctgggctgga

SEQ ID NO: 2781 - DNA, 92 bp, synthetic construct
  source 1..92: mol_type = other DNA
tgtggttgttttgccggcaccatagtgagccaggagtaggttgcactctccagtgagaactcggacacacagcctgagtgagctgggctgga

SEQ ID NO: 2782 - DNA, 92 bp, synthetic construct
  source 1..92: mol_type = other DNA
tgtggttgttttgccggcaccatagtgagccaggattttttagcactctccagtgagaactcggacacacagcctgagtgagctgggctgga

SEQ ID NO: 2783 - DNA, 92 bp, synthetic construct
  source 1..92: mol_type = other DNA
tgtggttgttttgccggcaccatagtgagccaggttttttaagcactctccagtgagaactcggacacacagcctgagtgagctgggctgga

SEQ ID NO: 2784 - DNA, 92 bp, synthetic construct
  source 1..92: mol_type = other DNA
tgtggttgttttgccggcaccatagtgagccaggaggccaaagcagagagcagtgagaactcggacacacagcctgagtgagctgggctgga

SEQ ID NO: 2785 - DNA, 92 bp, synthetic construct
  source 1..92: mol_type = other DNA
tgtggttgttttgccggcaccatagtgagccaggaggccaaagctgagaccagtgagaactcggacacacagcctgagtgagctgggctgga

SEQ ID NO: 2786 - DNA, 92 bp, synthetic construct
  source 1..92: mol_type = other DNA
tgtggttgttttgccggcaccatagtgagccaggaggccaaaggtgagtccagtgagaactcggacacacagcctgagtgagctgggctgga

SEQ ID NO: 2787 - DNA, 92 bp, synthetic construct
  source 1..92: mol_type = other DNA
tgtggttgttttgccggcaccatagtgagccaggaggccaaatttgactccagtgagaactcggacacacagcctgagtgagctgggctgga

SEQ ID NO: 2788 - DNA, 92 bp, synthetic construct
  source 1..92: mol_type = other DNA
tgtggttgttttgccggcaccatagtgagccaggaggccaattttgtctccagtgagaactcggacacacagcctgagtgagctgggctgga

SEQ ID NO: 2789 - DNA, 92 bp, synthetic construct
  source 1..92: mol_type = other DNA
tgtggttgttttgccggcaccatagtgagccaggaggccatttttctctccagtgagaactcggacacacagcctgagtgagctgggctgga

SEQ ID NO: 2790 - DNA, 92 bp, synthetic construct
  source 1..92: mol_type = other DNA
tgtggttgttttgccggcaccatagtgagccaggaggccttttaactctccagtgagaactcggacacacagcctgagtgagctgggctgga

SEQ ID NO: 2791 - DNA, 92 bp, synthetic construct
  source 1..92: mol_type = other DNA
tgtggttgttttgccggcaccatagtgagccaggaggcgtttccactctccagtgagaactcggacacacagcctgagtgagctgggctgga

SEQ ID NO: 2792 - DNA, 92 bp, synthetic construct
  source 1..92: mol_type = other DNA
tgtggttgttttgccggcaccatagtgagccaggaggggtttgcactctccagtgagaactcggacacacagcctgagtgagctgggctgga

SEQ ID NO: 2793 - DNA, 92 bp, synthetic construct
  source 1..92: mol_type = other DNA
tgtggttgttttgccggcaccatagtgagccaggagaatttagcactctccagtgagaactcggacacacagcctgagtgagctgggctgga

SEQ ID NO: 2794 - DNA, 92 bp, synthetic construct
  source 1..92: mol_type = other DNA
tgtggttgttttgccggcaccatagtgagccaggaaaattaagcactctccagtgagaactcggacacacagcctgagtgagctgggctgga

SEQ ID NO: 2795 - DNA, 92 bp, synthetic construct
  source 1..92: mol_type = other DNA
tgtggttgttttgccggcaccatagtgagccaggtttaaaaagcactctccagtgagaactcggacacacagcctgagtgagctgggctgga

SEQ ID NO: 2796 - DNA, 92 bp, synthetic construct
  source 1..92: mol_type = other DNA
tgtggttgttttgccggcaccatagtgagccaggaggccaaagcacagagcagtgagaactcggacacacagcctgagtgagctgggctgga

SEQ ID NO: 2797 - DNA, 92 bp, synthetic construct
  source 1..92: mol_type = other DNA
tgtggttgttttgccggcaccatagtgagccaggaggccaaagcagagaccagtgagaactcggacacacagcctgagtgagctgggctgga

SEQ ID NO: 2798 - DNA, 92 bp, synthetic construct
  source 1..92: mol_type = other DNA
tgtggttgttttgccggcaccatagtgagccaggaggccaaagctgagtccagtgagaactcggacacacagcctgagtgagctgggctgga

SEQ ID NO: 2799 - DNA, 92 bp, synthetic construct
  source 1..92: mol_type = other DNA
tgtggttgttttgccggcaccatagtgagccaggaggccaaaggtgactccagtgagaactcggacacacagcctgagtgagctgggctgga

SEQ ID NO: 2800 - DNA, 92 bp, synthetic construct
  source 1..92: mol_type = other DNA
tgtggttgttttgccggcaccatagtgagccaggaggccaaatttgtctccagtgagaactcggacacacagcctgagtgagctgggctgga

SEQ ID NO: 2801 - DNA, 92 bp, synthetic construct
  source 1..92: mol_type = other DNA
tgtggttgttttgccggcaccatagtgagccaggaggccaattttctctccagtgagaactcggacacacagcctgagtgagctgggctgga

SEQ ID NO: 2802 - DNA, 92 bp, synthetic construct
  source 1..92: mol_type = other DNA
tgtggttgttttgccggcaccatagtgagccaggaggccatttaactctccagtgagaactcggacacacagcctgagtgagctgggctgga

SEQ ID NO: 2803 - DNA, 92 bp, synthetic construct
  source 1..92: mol_type = other DNA
tgtggttgttttgccggcaccatagtgagccaggaggcctttccactctccagtgagaactcggacacacagcctgagtgagctgggctgga

SEQ ID NO: 2804 - DNA, 92 bp, synthetic construct
  source 1..92: mol_type = other DNA
tgtggttgttttgccggcaccatagtgagccaggaggcgtttgcactctccagtgagaactcggacacacagcctgagtgagctgggctgga

SEQ ID NO: 2805 - DNA, 92 bp, synthetic construct
  source 1..92: mol_type = other DNA
tgtggttgttttgccggcaccatagtgagccaggaggatttagcactctccagtgagaactcggacacacagcctgagtgagctgggctgga

SEQ ID NO: 2806 - DNA, 93 bp, synthetic construct
  source 1..93: mol_type = other DNA
tgtggttgttttgccggcaccatagtgagccaggagaattaagcactctccagtgagaactcggacacacagcctgagtgagctgggctggag

SEQ ID NO: 2807 - DNA, 92 bp, synthetic construct
  source 1..92: mol_type = other DNA
tgtggttgttttgccggcaccatagtgagccaggattaaaaagcactctccagtgagaactcggacacacagcctgagtgagctgggctgga

SEQ ID NO: 2808 - DNA, 92 bp, synthetic construct
  source 1..92: mol_type = other DNA
tgtggttgttttgccggcaccatagtgagccaggaggccaaagcactgagcagtgagaactcggacacacagcctgagtgagctgggctgga

SEQ ID NO: 2809 - DNA, 92 bp, synthetic construct
  source 1..92: mol_type = other DNA
tgtggttgttttgccggcaccatagtgagccaggaggccaaagcacagaccagtgagaactcggacacacagcctgagtgagctgggctgga

SEQ ID NO: 2810 - DNA, 92 bp, synthetic construct
  source 1..92: mol_type = other DNA
tgtggttgttttgccggcaccatagtgagccaggaggccaaagcagagtccagtgagaactcggacacacagcctgagtgagctgggctgga

SEQ ID NO: 2811 - DNA, 92 bp, synthetic construct
  source 1..92: mol_type = other DNA
tgtggttgttttgccggcaccatagtgagccaggaggccaaagctgactccagtgagaactcggacacacagcctgagtgagctgggctgga

SEQ ID NO: 2812 - DNA, 92 bp, synthetic construct
  source 1..92: mol_type = other DNA
tgtggttgttttgccggcaccatagtgagccaggaggccaaaggtgtctccagtgagaactcggacacacagcctgagtgagctgggctgga

SEQ ID NO: 2813 - DNA, 92 bp, synthetic construct
  source 1..92: mol_type = other DNA
tgtggttgttttgccggcaccatagtgagccaggaggccaaatttctctccagtgagaactcggacacacagcctgagtgagctgggctgga

SEQ ID NO: 2814 - DNA, 92 bp, synthetic construct
  source 1..92: mol_type = other DNA
tgtggttgttttgccggcaccatagtgagccaggaggccaattaactctccagtgagaactcggacacacagcctgagtgagctgggctgga

SEQ ID NO: 2815 - DNA, 92 bp, synthetic construct
  source 1..92: mol_type = other DNA
tgtggttgttttgccggcaccatagtgagccaggaggccattccactctccagtgagaactcggacacacagcctgagtgagctgggctgga

SEQ ID NO: 2816 - DNA, 92 bp, synthetic construct
  source 1..92: mol_type = other DNA
tgtggttgttttgccggcaccatagtgagccaggaggcctttgcactctccagtgagaactcggacacacagcctgagtgagctgggctgga

SEQ ID NO: 2817 - DNA, 92 bp, synthetic construct
  source 1..92: mol_type = other DNA
tgtggttgttttgccggcaccatagtgagccaggaggcgttagcactctccagtgagaactcggacacacagcctgagtgagctgggctgga

SEQ ID NO: 2818 - DNA, 92 bp, synthetic construct
  source 1..92: mol_type = other DNA
tgtggttgttttgccggcaccatagtgagccaggaggattaagcactctccagtgagaactcggacacacagcctgagtgagctgggctgga

SEQ ID NO: 2819 - DNA, 92 bp, synthetic construct
  source 1..92: mol_type = other DNA
tgtggttgttttgccggcaccatagtgagccaggagtaaaaagcactctccagtgagaactcggacacacagcctgagtgagctgggctgga

SEQ ID NO: 2820 - DNA, 92 bp, synthetic construct
  source 1..92: mol_type = other DNA
tgtggttgttttgccggcaccatagtgagccaggaggccaaagcactcagcagtgagaactcggacacacagcctgagtgagctgggctgga

SEQ ID NO: 2821 - DNA, 92 bp, synthetic construct
  source 1..92: mol_type = other DNA
tgtggttgttttgccggcaccatagtgagccaggaggccaaagcactgaccagtgagaactcggacacacagcctgagtgagctgggctgga

SEQ ID NO: 2822 - DNA, 92 bp, synthetic construct
  source 1..92: mol_type = other DNA
tgtggttgttttgccggcaccatagtgagccaggaggccaaagcacagtccagtgagaactcggacacacagcctgagtgagctgggctgga

SEQ ID NO: 2823 - DNA, 92 bp, synthetic construct
  source 1..92: mol_type = other DNA
tgtggttgttttgccggcaccatagtgagccaggaggccaaagcagactccagtgagaactcggacacacagcctgagtgagctgggctgga

SEQ ID NO: 2824 - DNA, 92 bp, synthetic construct
  source 1..92: mol_type = other DNA
tgtggttgttttgccggcaccatagtgagccaggaggccaaagctgtctccagtgagaactcggacacacagcctgagtgagctgggctgga

SEQ ID NO: 2825 - DNA, 92 bp, synthetic construct
  source 1..92: mol_type = other DNA
tgtggttgttttgccggcaccatagtgagccaggaggccaaagatctctccagtgagaactcggacacacagcctgagtgagctgggctgga

SEQ ID NO: 2826 - DNA, 92 bp, synthetic construct
  source 1..92: mol_type = other DNA
tgtggttgttttgccggcaccatagtgagccaggaggccaaataactctccagtgagaactcggacacacagcctgagtgagctgggctgga

SEQ ID NO: 2827 - DNA, 92 bp, synthetic construct
  source 1..92: mol_type = other DNA
tgtggttgttttgccggcaccatagtgagccaggaggccaatccactctccagtgagaactcggacacacagcctgagtgagctgggctgga

SEQ ID NO: 2828 - DNA, 92 bp, synthetic construct
  source 1..92: mol_type = other DNA
tgtggttgttttgccggcaccatagtgagccaggaggccattgcactctccagtgagaactcggacacacagcctgagtgagctgggctgga

SEQ ID NO: 2829 - DNA, 92 bp, synthetic construct
  source 1..92: mol_type = other DNA
tgtggttgttttgccggcaccatagtgagccaggaggccttagcactctccagtgagaactcggacacacagcctgagtgagctgggctgga

SEQ ID NO: 2830 - DNA, 92 bp, synthetic construct
  source 1..92: mol_type = other DNA
tgtggttgttttgccggcaccatagtgagccaggaggtgtaagcactctccagtgagaactcggacacacagcctgagtgagctgggctgga

SEQ ID NO: 2831 - DNA, 92 bp, synthetic construct
  source 1..92: mol_type = other DNA
tgtggttgttttgccggcaccatagtgagccaggaggaaaaagcactctccagtgagaactcggacacacagcctgagtgagctgggctgga

SEQ ID NO: 2832 - DNA, 92 bp, synthetic construct
  source 1..92: mol_type = other DNA
tgtggttgttttgccggcaccatagtgagccaggaggccaaagcactctgcagtgagaactcggacacacagcctgagtgagctgggctgga

SEQ ID NO: 2833 - DNA, 92 bp, synthetic construct
  source 1..92: mol_type = other DNA
tgtggttgttttgccggcaccatagtgagccaggaggccaaagcactcaccagtgagaactcggacacacagcctgagtgagctgggctgga

SEQ ID NO: 2834 - DNA, 92 bp, synthetic construct
  source 1..92: mol_type = other DNA
tgtggttgttttgccggcaccatagtgagccaggaggccaaagcactgtccagtgagaactcggacacacagcctgagtgagctgggctgga

SEQ ID NO: 2835 - DNA, 92 bp, synthetic construct
  source 1..92: mol_type = other DNA
tgtggttgttttgccggcaccatagtgagccaggaggccaaagcacactccagtgagaactcggacacacagcctgagtgagctgggctgga

SEQ ID NO: 2836 - DNA, 92 bp, synthetic construct
  source 1..92: mol_type = other DNA
tgtggttgttttgccggcaccatagtgagccaggaggccaaagcagtctccagtgagaactcggacacacagcctgagtgagctgggctgga

SEQ ID NO: 2837 - DNA, 92 bp, synthetic construct
  source 1..92: mol_type = other DNA
tgtggttgttttgccggcaccatagtgagccaggaggccaaagttctctccagtgagaactcggacacacagcctgagtgagctgggctgga

SEQ ID NO: 2838 - DNA, 92 bp, synthetic construct
  source 1..92: mol_type = other DNA
tgtggttgttttgccggcaccatagtgagccaggaggccaaagaactctccagtgagaactcggacacacagcctgagtgagctgggctgga

SEQ ID NO: 2839 - DNA, 92 bp, synthetic construct
  source 1..92: mol_type = other DNA
tgtggttgttttgccggcaccatagtgagccaggaggccaaaccactctccagtgagaactcggacacacagcctgagtgagctgggctgga

SEQ ID NO: 2840 - DNA, 92 bp, synthetic construct
  source 1..92: mol_type = other DNA
tgtggttgttttgccggcaccatagtgagccaggaggccaatgcactctccagtgagaactcggacacacagcctgagtgagctgggctgga

SEQ ID NO: 2841 - DNA, 92 bp, synthetic construct
  source 1..92: mol_type = other DNA
tgtggttgttttgccggcaccatagtgagccaggaggccatagcactctccagtgagaactcggacacacagcctgagtgagctgggctgga

SEQ ID NO: 2842 - DNA, 92 bp, synthetic construct
  source 1..92: mol_type = other DNA
tgtggttgttttgccggcaccatagtgagccaggaggtctaagcactctccagtgagaactcggacacacagcctgagtgagctgggctgga

SEQ ID NO: 2843 - DNA, 92 bp, synthetic construct
  source 1..92: mol_type = other DNA
tgtggttgttttgccggcaccatagtgagccaggaggcgaaagcactctccagtgagaactcggacacacagcctgagtgagctgggctgga

SEQ ID NO: 2844 - DNA, 113 bp, synthetic construct
  source 1..113: mol_type = other DNA
ccctggtgtgccctctgatgttttttaggggattctacagcagtactgagcaatgccgtagtcagcaatctttgcatactacgcagcattgggatacagtgtgaaaagcagca

SEQ ID NO: 2845 - DNA, 113 bp, synthetic construct
  source 1..113: mol_type = other DNA
ccctggtgtgccctctgatgttttttaggggattctacaacagtactgagctatcccgaattcaacaatctttgcatactacgcagcattgggatacagtgtgaaaagcagca

SEQ ID NO: 2846 - DNA, 113 bp, synthetic construct
  source 1..113: mol_type = other DNA
ccctggtgtgccctctgatgttttttaggggattctacatctgtagtgagcaattccgtgctcagcaatctttgcatactacgcagcattgggatacagtgtgaaaagcagca

SEQ ID NO: 2847 - DNA, 113 bp, synthetic construct; identical to SEQ ID NO: 2844
  source 1..113: mol_type = other DNA

SEQ ID NO: 2848 - DNA, 113 bp, synthetic construct
  source 1..113: mol_type = other DNA
ccctggtgtgccctctgatgttttttaggggcttctacagcagttcggaggaatcccgaggtcagcaatctttgcatactacgcagcattgggatacagtgtgaaaagcagca

SEQ ID NO: 2849 - DNA, 113 bp, synthetic construct; identical to SEQ ID NO: 2845
  source 1..113: mol_type = other DNA

SEQ ID NO: 2850 - DNA, 113 bp, synthetic construct
  source 1..113: mol_type = other DNA
ccctggtgtgccctctgatgttttttaggggattctaccgctgtgctgggcaatcccgtggtcagcaatctttgcatactacgcagcattgggatacagtgtgaaaagcagca

SEQ ID NO: 2851 - DNA, 113 bp, synthetic construct
  source 1..113: mol_type = other DNA
ccctggtgtgccctctgatgttttttaggggattctacagtaggactgagcactgccgagctgggcaatctttgcatactacgcagcattgggatacagtgtgaaaagcagca

SEQ ID NO: 2852 - DNA, 113 bp, synthetic construct; identical to SEQ ID NO: 2846
  source 1..113: mol_type = other DNA

SEQ ID NO: 2853 - DNA, 113 bp, synthetic construct
  source 1..113: mol_type = other DNA
ccctggtgtgccctctgatgttttttaggggattctacggtaggactgatcagtcccgtggtcgaaccacgttgcatactacgcagcattgggatacagtgtgaaaagcagca

SEQ ID NO: 2854 - DNA, 113 bp, synthetic construct
  source 1..113: mol_type = other DNA
ccctggtgtgccctctgatgttttttaggggattctacggcaagactgagcagtcccgtggtggaaccccgttgcatactacgcagcattgggatacagtgtgaaaagcagca

SEQ ID NO: 2855 - DNA, 113 bp, synthetic construct
  source 1..113: mol_type = other DNA
ccctggtgtgccctctgatgttttttaggggatcctacggcagtactgatcaaatccgtggtggcaccccgttgcatactacgcagcattgggatacagtgtgaaaagcagca

SEQ ID NO: 2856 - DNA, 113 bp, synthetic construct
  source 1..113: mol_type = other DNA
ccctggtgtgccctctgatgttttttaggggattctacagcaggactgaccagttccgtggtggcacctccgtgcatactacgcagcattgggatacagtgtgaaaagcagca

SEQ ID NO: 2857 - DNA, 113 bp, synthetic construct
  source 1..113: mol_type = other DNA
ccctggtgtgccctctgatgttttttaggggattctacggcagtactgagaaatcccgtggtggcaccccgttgcatactacgcagcattgggatacagtgtgaaaagcagca

SEQ ID NO: 2858 - DNA, 113 bp, synthetic construct
  source 1..113: mol_type = other DNA
ccctggtgtgccctctgatgttttttaggggattctacagcagtcctgaccagtcccgtggtcgtacctccgtgcatactacgcagcattgggatacagtgtgaaaagcagca

SEQ ID NO: 2859 - DNA, 113 bp, synthetic construct
  source 1..113: mol_type = other DNA
ccctggtgtgccctctgatgttttttaggggcttctacagcaggactgatcaaatccgtggtggaaccccgttgcatactacgcagcattgggatacagtgtgaaaagcagca

SEQ ID NO: 2860 - DNA, 113 bp, synthetic construct
  source 1..113: mol_type = other DNA
ccctggtgtgccctctgatgttttttaggggattctacggcagtactgagacatcccgtggtggcacccccgtgcatactacgcagcattgggatacagtgtgaaaagcagca

SEQ ID NO: 2861 - DNA, 113 bp, synthetic construct
  source 1..113: mol_type = other DNA
ccctggtgtgccctctgatgttttttaggggattctaccgcagtactcaccagtcgccgtgtcgtcaatctttgcatactacgcagcattgggatacagtgtgaaaagcagca

SEQ ID NO: 2862 - DNA, 113 bp, synthetic construct
  source 1..113: mol_type = other DNA
ccctggtgtgccctctgatgttttttaggggattctaccgcagtactcaccagtcgccgtgtcggcaatctttgcatactacgcagcattgggatacagtgtgaaaagcagca

SEQ ID NO: 2863 - DNA, 113 bp, synthetic construct
  source 1..113: mol_type = other DNA
ccctggtgtgccctctgatgttttttaggggattctacagcattactcagcagtgcgttagtcagcactctttgcatactacgcagcattgggatacagtgtgaaaagcagca

SEQ ID NO: 2864 - DNA, 113 bp, synthetic construct; identical to SEQ ID NO: 2771
  source 1..113: mol_type = other DNA

SEQ ID NO: 2865 - DNA, 113 bp, synthetic construct
  source 1..113: mol_type = other DNA
ccctggtgtgccctctgatgttttttaggggattctacagcaatactcagcagtgcgtgagtcagcaatctttgcatactacgcagcattgggatacagtgtgaaaagcagca

SEQ ID NO: 2866 - DNA, 113 bp, synthetic construct
  source 1..113: mol_type = other DNA
ccctggtgtgccctctgatgttttttaggggattctacagcacgactgagcagtgcgctagtcggcaatctttgcatactacgcagcattgggatacagtgtgaaaagcagca

SEQ ID NO: 2867 - DNA, 113 bp, synthetic construct; identical to SEQ ID NO: 2770
  source 1..113: mol_type = other DNA

SEQ ID NO: 2868 - DNA, 113 bp, synthetic construct
  source 1..113: mol_type = other DNA
ccctggtgtgccctctgatgttttttaggggattctacatcaggactgagcttttccgaggtcggctatctttgcatactacgcagcattgggatacagtgtgaaaagcagca

SEQ ID NO: 2869 - DNA, 113 bp, synthetic construct
  source 1..113: mol_type = other DNA
ccctggtgtgccctctgatgttttttaggggattctacatcagtactgggcagttccgtagtcggcaatctttgcatactacgcagcattgggatacagtgtgaaaagcagca

SEQ ID NO: 2870 - DNA, 113 bp, synthetic construct
  source 1..113: mol_type = other DNA
ccctggtgtgccctctgatgttttttaggggattctacagcagtactgggcagtgcgctagtcggcactctttgcatactacgcagcattgggatacagtgtgaaaagcagca

SEQ ID NO: 2871 - DNA, 113 bp, synthetic construct
  source 1..113: mol_type = other DNA
ccctggtgtgccctctgatgttttttaggggattctacagcaatactcaccagtcccgatgtaagcaatctttgcatactacgcagcattgggatacagtgtgaaaagcagca

SEQ ID NO: 2872 - DNA, 113 bp, synthetic construct
  source 1..113: mol_type = other DNA
ccctggtgtgccctctgatgttttttaggggattctacggcagtactgtgaaatcccgatgtcggcaatctttgcatactacgcagcattgggatacagtgtgaaaagcagca

SEQ ID NO: 2873 - DNA, 113 bp, synthetic construct
  source 1..113: mol_type = other DNA
ccctggtgtgccctctgatgttttttaggggattctaccgcaggacggagctatcccgagttaggcaatctttgcatactacgcagcattgggatacagtgtgaaaagcagca

SEQ ID NO: 2874 - DNA, 113 bp, synthetic construct
  source 1..113: mol_type = other DNA
ccctggtgtgccctctgatgttttttaggggattctacggcatgactgatcagtcccgtggtcggaccccgatgcatactacgcagcattgggatacagtgtgaaaagcagca

SEQ ID NO: 2875 - DNA, 113 bp, synthetic construct
  source 1..113: mol_type = other DNA
ccctggtgtgccctctgatgttttttaggggattctacggcaagactgggcagtcccgtggtcggacccccgtgcatactacgcagcattgggatacagtgtgaaaagcagca

SEQ ID NO: 2876 - DNA, 113 bp, synthetic construct
  source 1..113: mol_type = other DNA
ccctggtgtgccctctgatgttttttaggggattctacggcaggactgggctttcccgtggtcggacctccgtgcatactacgcagcattgggatacagtgtgaaaagcagca

SEQ ID NO: 2877 - DNA, 113 bp, synthetic construct
  source 1..113: mol_type = other DNA
ccctggtgtgccctctgatgttttttaggggattctacagcacgactgagcagtgcgctagtcagcaatatttgcatactacgcagcattgggatacagtgtgaaaagcagca

SEQ ID NO: 2878 - DNA, 113 bp, synthetic construct
  source 1..113: mol_type = other DNA
ccctggtgtgccctctgatgttttttaggggattctacagcaatactcagcagtgcgctagtcagccatctttgcatactacgcagcattgggatacagtgtgaaaagcagca

SEQ ID NO: 2879 - DNA, 113 bp, synthetic construct
  source 1..113: mol_type = other DNA
ccctggtgtgccctctgatgttttttaggggattctacagcatgactgagcagtcccgtagtcggcaatctttgcatactacgcagcattgggatacagtgtgaaaagcagca

SEQ ID NO: 2880 - DNA, 113 bp, synthetic construct
  source 1..113: mol_type = other DNA
ccctggtgtgccctctgatgttttttaggggattctacagcaatactcagcagttccgtagtcagcaatatttgcatactacgcagcattgggatacagtgtgaaaagcagca

SEQ ID NO: 2881 - DNA, 113 bp, synthetic construct
  source 1..113: mol_type = other DNA
ccctggtgtgccctctgatgttttttaggggattctagagaggtactgtgccatcccgtggtcggccatctttgcatactacgcagcattgggatacagtgtgaaaagcagca

SEQ ID NO: 2882 - DNA, 113 bp, synthetic construct
  source 1..113: mol_type = other DNA
ccctggtgtgccctctgatgttttttaggggattctagagcaggacggtgcagtcccgtggtcggcaatctttgcatactacgcagcattgggatacagtgtgaaaagcagca

SEQ ID NO: 2883 - DNA, 113 bp, synthetic construct; identical to SEQ ID NO: 2769
  source 1..113: mol_type = other DNA

SEQ ID NO: 2884 - DNA, 113 bp, synthetic construct
  source 1..113: mol_type = other DNA
ccctggtgtgccctctgatgttttttaggggattctacagcggtactgtgcaaatccgtggtcggtcatctttgcatactacgcagcattgggatacagtgtgaaaagcagca

SEQ ID NO: 2885 - DNA, 113 bp, synthetic construct
  source 1..113: mol_type = other DNA
ccctggtgtgccctctgatgttttttaggggattctacggcaggactggggaaatccgtggtcggccatctttgcatactacgcagcattgggatacagtgtgaaaagcagca

SEQ ID NO: 2886 - DNA, 113 bp, synthetic construct
  source 1..113: mol_type = other DNA
ccctggtgtgccctctgatgttttttaggggattctacagcggtactgcgcagtcccgtggtggtccatctttgcatactacgcagcattgggatacagtgtgaaaagcagca

SEQ ID NO: 2887 - DNA, 113 bp, synthetic construct
  source 1..113: mol_type = other DNA
ccctggtgtgccctctgatgttttttaggggattctatagcaggaatgaggaaatccgtggtcggcaatctttgcatactacgcagcattgggatacagtgtgaaaagcagca

SEQ ID NO: 2888 - DNA, 113 bp, synthetic construct
  source 1..113: mol_type = other DNA
ccctggtgtgccctctgatgttttttaggggattctacagcagtactcaggaaatccgtggtcggatatctttgcatactacgcagcattgggatacagtgtgaaaagcagca

SEQ ID NO: 2889 - DNA, 113 bp, synthetic construct
  source 1..113: mol_type = other DNA
ccctggtgtgccctctgatgttttttaggggattctaaagcaggagtgagcagatccgtggtcggcaatctttgcatactacgcagcattgggatacagtgtgaaaagcagca

SEQ ID NO: 2890 - DNA, 113 bp, synthetic construct
  source 1..113: mol_type = other DNA
ccctggtgtgccctctgatgttttttaggggattctacaggtgtactgtgaaatcccgtggtcataaatctttgcatactacgcagcattgggatacagtgtgaaaagcagca

SEQ ID NO: 2891 - DNA, 113 bp, synthetic construct
  source 1..113: mol_type = other DNA
ccctggtgtgccctctgatgttttttaggggattctacagcattactcagcagtcccgtagtcagcaatatttgcatactacgcagcattgggatacagtgtgaaaagcagca

SEQ ID NO: 2892 - DNA, 113 bp, synthetic construct
  source 1..113: mol_type = other DNA
ccctggtgtgccctctgatgttttttaggggattctacagcattactcagcaaatccgtagtcagaaatctttgcatactacgcagcattgggatacagtgtgaaaagcagca

SEQ ID NO: 2893 - DNA, 113 bp, synthetic construct
  source 1..113: mol_type = other DNA
ccctggtgtgccctctgatgttttttaggggattctacagcaggactgagcaatcttgtggtcagcaatatttgcatactacgcagcattgggatacagtgtgaaaagcagca

SEQ ID NO: 2894 - DNA, 113 bp, synthetic construct
  source 1..113: mol_type = other DNA
ccctggtgtgccctctgatgttttttaggggattctacagcaggactgagcaatggagtggtcagcaatatttgcatactacgcagcattgggatacagtgtgaaaagcagca

SEQ ID NO: 2895 - DNA, 113 bp, synthetic construct
  source 1..113: mol_type = other DNA
ccctggtgtgccctctgatgttttttaggggattctacagcacgactgagcagtgcgttagtcagccatctttgcatactacgcagcattgggatacagtgtgaaaagcagca

SEQ ID NO: 2896 - DNA, 100 bp, synthetic construct
  source 1..100: mol_type = other DNA
aacttcaggtgcacgaaaccctggtgtgccctctgatgttttttaggggattctacatctgtagtgagcaattccgtgctcagcaatcaaacgtatgatg

SEQ ID NO: 2897 - DNA, 100 bp, synthetic construct
  source 1..100: mol_type = other DNA
caggtgcacgaaaccctggtgtgccctctgatgttttttaggggattctacatctgtagtgagcaattccgtgctcagcaatcaaacgtatgatggcagc

SEQ ID NO: 2898 - DNA, 100 bp, synthetic construct
  source 1..100: mol_type = other DNA
gcacgaaaccctggtgtgccctctgatgttttttaggggattctacatctgtagtgagcaattccgtgctcagcaatcaaacgtatgatggcagcattgg

SEQ ID NO: 2899 - DNA, 100 bp, synthetic construct
  source 1..100: mol_type = other DNA
aaaccctggtgtgccctctgatgttttttaggggattctacatctgtagtgagcaattccgtgctcagcaatcaaacgtatgatggcagcattgggatac

SEQ ID NO: 2900 - DNA, 100 bp, synthetic construct
  source 1..100: mol_type = other DNA
ctggtgtgccctctgatgttttttaggggattctacatctgtagtgagcaattccgtgctcagcaatcaaacgtatgatggcagcattgggatacagtgt

SEQ ID NO: 2901 - DNA, 100 bp, synthetic construct
  source 1..100: mol_type = other DNA
gtgccctctgatgttttttaggggattctacatctgtagtgagcaattccgtgctcagcaatcaaacgtatgatggcagcattgggatacagtgtgaaaa

SEQ ID NO: 2902 - DNA, 100 bp, synthetic construct
  source 1..100: mol_type = other DNA
aaaccctggtgtgccctctgtccaaattatccccattctacatctgtagtgagcaattccgtgctcagcaatcaaacgtatgatggcagcattgggatac

SEQ ID NO: 2903 - DNA, 100 bp, synthetic construct
  source 1..100: mol_type = other DNA
aaaccctggtgtgccctctgatcaaaacatccccattctacatctgtagtgagcaattccgtgctcagcaatcaaacgtatgatggcagcattgggatac

SEQ ID NO: 2904 - DNA, 100 bp, synthetic construct
  source 1..100: mol_type = other DNA
aaaccctggtgtgccctctgatgtaaactaccccattctacatctgtagtgagcaattccgtgctcagcaatcaaacgtatgatggcagcattgggatac

SEQ ID NO: 2905 - DNA, 100 bp, synthetic construct
  source 1..100: mol_type = other DNA
aaaccctggtgtgccctctgatgtttactaggccattctacatctgtagtgagcaattccgtgctcagcaatcaaacgtatgatggcagcattgggatac

SEQ ID NO: 2906 - DNA, 100 bp, synthetic construct
  source 1..100: mol_type = other DNA
aaaccctggtgtgccctctgatgtttttaaggggtttctacatctgtagtgagcaattccgtgctcagcaatcaaacgtatgatggcagcattgggatac

SEQ ID NO: 2907 - DNA, 100 bp, synthetic construct
  source 1..100: mol_type = other DNA
aaaccctggtgtgccctctgatgtttttatggggtctctacatctgtagtgagcaattccgtgctcagcaatcaaacgtatgatggcagcattgggatac

SEQ ID NO: 2908 - DNA, 100 bp, synthetic construct
  source 1..100: mol_type = other DNA
aaaccctggtgtgccctctgatgtttttatcgggtcactacatctgtagtgagcaattccgtgctcagcaatcaaacgtatgatggcagcattgggatac

SEQ ID NO: 2909 - DNA, 100 bp, synthetic construct
  source 1..100: mol_type = other DNA
aaaccctggtgtgccctctgatgtttttatccggtcagtacatctgtagtgagcaattccgtgctcagcaatcaaacgtatgatggcagcattgggatac

SEQ ID NO: 2910 - DNA, 100 bp, synthetic construct
  source 1..100: mol_type = other DNA
aaaccctggtgtgccctctgtccaaattatccccattctacatctgtagtgagcaattccgtgctcagcaatctttgcaatgaactgtccattgggatac

SEQ ID NO: 2911 - DNA, 100 bp, synthetic construct
  source 1..100: mol_type = other DNA
aaaccctggtgtgccctctgtccaaattatccccattctacatctgtagtgagcaattccgtgctcagcaatctttgcaatctactgagcattgggatac

SEQ ID NO: 2912 - DNA, 100 bp, synthetic construct
  source 1..100: mol_type = other DNA
aaaccctggtgtgccctctgtccaaattatccccattctacatctgtagtgagcaattccgtgctcagcaatctttgcaccctacgcagcattgggatac

SEQ ID NO: 2913 - DNA, 100 bp, synthetic construct
  source 1..100: mol_type = other DNA
aaaccctggtgtgccctctgtccaaattatccccattctacatctgtagtgagcaattccgtgctcagcaatctttggtcccttggcagcattgggatac

SEQ ID NO: 2914 - DNA, 100 bp, synthetic construct
  source 1..100: mol_type = other DNA
aaaccctggtgtgccctctgtccaaattatccccattctacatctgtagtgagcaattccgtgctcagcaatcttacgtccgatggcagcattgggatac

SEQ ID NO: 2915 - DNA, 100 bp, synthetic construct
  source 1..100: mol_type = other DNA
aaaccctggtgtgccctctgtccaaattatccccattctacatctgtagtgagcaattccgtgctcagcaaagaaaccaatgatggcagcattgggatac

SEQ ID NO: 2916 - DNA, 100 bp, synthetic construct
  source 1..100: mol_type = other DNA
aaaccctggtgtgccctctgtccaaattatccccattctacatctgtagtgagcaattccgtgctcagctcagaatgcaatgatggcagcattgggatac

SEQ ID NO: 2917 - DNA, 90 bp, synthetic construct
  source 1..90: mol_type = other DNA
aaaccctggtgtgccctctgtccaaattatccccattctacatctgtagtgagcaattccgtgctcagctcagaatgcaatgatggcagc

SEQ ID NO: 2918 - DNA, 92 bp, synthetic construct
  source 1..92: mol_type = other DNA
aaaccctggtgtgccctctgtccaaattatccccattctacatctgtagtgagcaattccgtgctcagctcagaatgcaatgatggcagcat

SEQ ID NO: 2919 - DNA, 94 bp, synthetic construct
  source 1..94: mol_type = other DNA
aaaccctggtgtgccctctgtccaaattatccccattctacatctgtagtgagcaattccgtgctcagctcagaatgcaatgatggcagcattg

SEQ ID NO: 2920 - DNA, 96 bp, synthetic construct
  source 1..96: mol_type = other DNA
aaaccctggtgtgccctctgtccaaattatccccattctacatctgtagtgagcaattccgtgctcagctcagaatgcaatgatggcagcattggg

SEQ ID NO: 2921 - DNA, 98 bp, synthetic construct
  source 1..98: mol_type = other DNA
aaaccctggtgtgccctctgtccaaattatccccattctacatctgtagtgagcaattccgtgctcagctcagaatgcaatgatggcagcattgggat

SEQ ID NO: 2922 - DNA, 90 bp, synthetic construct
  source 1..90: mol_type = other DNA
gtgccctctgtccaaattatccccattctacatctgtagtgagcaattccgtgctcagctcagaatgcaatgatggcagcattgggatac

SEQ ID NO: 2923 - DNA, 92 bp, synthetic construct
  source 1..92: mol_type = other DNA
gtgtgccctctgtccaaattatccccattctacatctgtagtgagcaattccgtgctcagctcagaatgcaatgatggcagcattgggatac

SEQ ID NO: 2924 - DNA, 94 bp, synthetic construct
  source 1..94: mol_type = other DNA
tggtgtgccctctgtccaaattatccccattctacatctgtagtgagcaattccgtgctcagctcagaatgcaatgatggcagcattgggatac

SEQ ID NO: 2925 - DNA, 96 bp, synthetic construct
  source 1..96: mol_type = other DNA
cctggtgtgccctctgtccaaattatccccattctacatctgtagtgagcaattccgtgctcagctcagaatgcaatgatggcagcattgggatac

SEQ ID NO: 2926 - DNA, 98 bp, synthetic construct
  source 1..98: mol_type = other DNA
accctggtgtgccctctgtccaaattatccccattctacatctgtagtgagcaattccgtgctcagctcagaatgcaatgatggcagcattgggatac

SEQ ID NO: 2927 - DNA, 100 bp, synthetic construct
  source 1..100: mol_type = other DNA
gtgccctctgatgttttttaggggattctaccgctgtgctgggcaatcccgtggtcagcaatcaaacgtatgatggcagcattgggatacagtgtgaaaa

SEQ ID NO: 2928 - DNA, 113 bp, synthetic construct; identical to SEQ ID NO: 148
  source 1..113: mol_type = other DNA

SEQ ID NO: 2929 - DNA, 100 bp, synthetic construct
  source 1..100: mol_type = other DNA
gtgccctctgatgtaaaataccccattctaccgctgtgctgggcaatcccgtggtcagcaatcaaacgtatgatggcagcattgggatacagtgtgaaaa

SEQ ID NO: 2930 - DNA, 100 bp, synthetic construct
  source 1..100: mol_type = other DNA
gtgccctctgatgtttaataggccattctaccgctgtgctgggcaatcccgtggtcagcaatcaaacgtatgatggcagcattgggatacagtgtgaaaa

SEQ ID NO: 2931 - DNA, 100 bp, synthetic construct; identical to SEQ ID NO: 2927
  source 1..100: mol_type = other DNA

SEQ ID NO: 2932 - DNA, 100 bp, synthetic construct
  source 1..100: mol_type = other DNA
gtgccctctgatgtttttaaggggtttctaccgctgtgctgggcaatcccgtggtcagcaatcaaacgtatgatggcagcattgggatacagtgtgaaaa

SEQ ID NO: 2933 - DNA, 100 bp, synthetic construct
  source 1..100: mol_type = other DNA
gtgccctctgatgtttttatcgggtcactaccgctgtgctgggcaatcccgtggtcagcaatcaaacgtatgatggcagcattgggatacagtgtgaaaa

SEQ ID NO: 2934 - DNA, 100 bp, synthetic construct
  source 1..100: mol_type = other DNA
gtgccctctgatgtttttatccggtcagtaccgctgtgctgggcaatcccgtggtcagcaatcaaacgtatgatggcagcattgggatacagtgtgaaaa

SEQ ID NO: 2935 - DNA, 100 bp, synthetic construct
  source 1..100: mol_type = other DNA
gtgccctctgatgtttttatcccgtcagaaccgctgtgctgggcaatcccgtggtcagcaatcaaacgtatgatggcagcattgggatacagtgtgaaaa

SEQ ID NO: 2936 - DNA, 100 bp, synthetic construct
  source 1..100: mol_type = other DNA
gtgccctctgatgtttaataggccattctaccgctgtgctgggcaatcccgtggtcagcaatctttgcaatgaaccgtccattgggatacagtgtgaaaa

SEQ ID NO: 2937 - DNA, 100 bp, synthetic construct
  source 1..100: mol_type = other DNA
gtgccctctgatgtttaataggccattctaccgctgtgctgggcaatcccgtggtcagcaatctttgcaatctaccgagcattgggatacagtgtgaaaa

SEQ ID NO: 2938 - DNA, 100 bp, synthetic construct
  source 1..100: mol_type = other DNA
gtgccctctgatgtttaataggccattctaccgctgtgctgggcaatcccgtggtcagcaatctttgcatactacgcagcattgggatacagtgtgaaaa

SEQ ID NO: 2939 - DNA, 100 bp, synthetic construct
  source 1..100: mol_type = other DNA
gtgccctctgatgtttaataggccattctaccgctgtgctgggcaatcccgtggtcagcaatctttggttacttggcagcattgggatacagtgtgaaaa

SEQ ID NO: 2940 - DNA, 100 bp, synthetic construct
  source 1..100: mol_type = other DNA
gtgccctctgatgtttaataggccattctaccgctgtgctgggcaatcccgtggtcagcaatcttacgttagatggcagcattgggatacagtgtgaaaa

SEQ ID NO: 2941 - skipped

SEQ ID NO: 2942 - DNA, 100 bp, synthetic construct
  source 1..100: mol_type = other DNA
gtgccctctgatgtttaataggccattctaccgctgtgctgggcaatcccgtggtcagcaaagaaaccaatgatggcagcattgggatacagtgtgaaaa

SEQ ID NO: 2943 - DNA, 100 bp, synthetic construct
  source 1..100: mol_type = other DNA
gtgccctctgatgtttaataggccattctaccgctgtgctgggcaatcccgtggtcagctcagaatgcaatgatggcagcattgggatacagtgtgaaaa

SEQ ID NO: 2944 - DNA, 100 bp, synthetic construct
  source 1..100: mol_type = other DNA
gtgccctctgatgtttaataggccattctaccgctgtgctgggcaatcccgtggtcaggtcagattgcaatgatggcagcattgggatacagtgtgaaaa

SEQ ID NO: 2945 - DNA, 100 bp, synthetic construct
  source 1..100: mol_type = other DNA
gtgccctctgatgtttaataggccattctaccgctgtgctgggcaatcccgtggtctcgtcactttgcaatgatggcagcattgggatacagtgtgaaaa

SEQ ID NO: 2946 - DNA, 113 bp, synthetic construct; identical to SEQ ID NO: 144
  source 1..113: mol_type = other DNA

SEQ ID NO: 2947 - DNA, 113 bp, synthetic construct; identical to SEQ ID NO: 145
  source 1..113: mol_type = other DNA

SEQ ID NO: 2948 - DNA, 113 bp, synthetic construct; identical to SEQ ID NO: 128
  source 1..113: mol_type = other DNA

SEQ ID NO: 2949 - DNA, 113 bp, synthetic construct; identical to SEQ ID NO: 129
  source 1..113: mol_type = other DNA

SEQ ID NO: 2950 - DNA, 113 bp, synthetic construct; identical to SEQ ID NO: 126
  source 1..113: mol_type = other DNA

SEQ ID NO: 2951 - DNA, 113 bp, synthetic construct; identical to SEQ ID NO: 127
  source 1..113: mol_type = other DNA

SEQ ID NO: 2952 - DNA, 113 bp, synthetic construct; identical to SEQ ID NO: 124
  source 1..113: mol_type = other DNA

SEQ ID NO: 2953 - DNA, 113 bp, synthetic construct; identical to SEQ ID NO: 125
  source 1..113: mol_type = other DNA

SEQ ID NO: 2954 - DNA, 113 bp, synthetic construct; identical to SEQ ID NO: 118
  source 1..113: mol_type = other DNA

SEQ ID NO: 2955 - DNA, 113 bp, synthetic construct; identical to SEQ ID NO: 119
  source 1..113: mol_type = other DNA

SEQ ID NO: 2956 - DNA, 113 bp, synthetic construct; identical to SEQ ID NO: 122
  source 1..113: mol_type = other DNA

SEQ ID NO: 2957 - DNA, 113 bp, synthetic construct; identical to SEQ ID NO: 123
  source 1..113: mol_type = other DNA

SEQ ID NO: 2958 - DNA, 113 bp, synthetic construct; identical to SEQ ID NO: 136
  source 1..113: mol_type = other DNA

SEQ ID NO: 2959 - DNA, 113 bp, synthetic construct; identical to SEQ ID NO: 140
  source 1..113: mol_type = other DNA

SEQ ID NO: 2960 - DNA, 113 bp, synthetic construct; identical to SEQ ID NO: 142
  source 1..113: mol_type = other DNA

SEQ ID NO: 2961 - skipped

SEQ ID NO: 2962 - DNA, 113 bp, synthetic construct; identical to SEQ ID NO: 141
  source 1..113: mol_type = other DNA

SEQ ID NO: 2963 - DNA, 113 bp, synthetic construct; identical to SEQ ID NO: 138
  source 1..113: mol_type = other DNA

SEQ ID NO: 2964 - DNA, 113 bp, synthetic construct
  source 1..113: mol_type = other DNA
ccctggtgtgccctctgatgttctttaggggattctacagtaggactgagcactgccgagctgggcaatctttgcatactacgcagcattgggatacagtgtgaagagcagca

SEQ ID NO: 2965 - DNA, 100 bp, synthetic construct
  source 1..100: mol_type = other DNA
aacttcaggtgcacgaaaccctggtgtgccctctgatgtttttatggggtgtctacagtaggactgagcactgccgagctgggcaatcttgagtcggatg

SEQ ID NO: 2966 - DNA, 100 bp, synthetic construct
  source 1..100: mol_type = other DNA
caggtgcacgaaaccctggtgtgccctctgatgtttttatggggtgtctacagtaggactgagcactgccgagctgggcaatcttgagtcggatggcagc

SEQ ID NO: 2967 - DNA, 100 bp, synthetic construct
  source 1..100: mol_type = other DNA
gcacgaaaccctggtgtgccctctgatgtttttatggggtgtctacagtaggactgagcactgccgagctgggcaatcttgagtcggatggcagcattgg

SEQ ID NO: 2968 - DNA, 100 bp, synthetic construct
  source 1..100: mol_type = other DNA
aaaccctggtgtgccctctgatgtttttatggggtgtctacagtaggactgagcactgccgagctgggcaatcttgagtcggatggcagcattgggatac

SEQ ID NO: 2969 - DNA, 100 bp, synthetic construct
  source 1..100: mol_type = other DNA
ctggtgtgccctctgatgtttttatggggtgtctacagtaggactgagcactgccgagctgggcaatcttgagtcggatggcagcattgggatacagtgt

SEQ ID NO: 2970 - DNA, 100 bp, synthetic construct
  source 1..100: mol_type = other DNA
gtgccctctgatgtttttatggggtgtctacagtaggactgagcactgccgagctgggcaatcttgagtcggatggcagcattgggatacagtgtgaaaa

SEQ ID NO: 2971 - skipped

SEQ ID NO: 2972 - DNA, 100 bp, synthetic construct
  source 1..100: mol_type = other DNA
ctggtgtgccctctgtaccaattatccccattctacagtaggactgagcactgccgagctgggcaatcttgagtcggatggcagcattgggatacagtgt

SEQ ID NO: 2973 - DNA, 100 bp, synthetic construct
  source 1..100: mol_type = other DNA
ctggtgtgccctctgatccaagcatccccattctacagtaggactgagcactgccgagctgggcaatcttgagtcggatggcagcattgggatacagtgt

SEQ ID NO: 2974 - DNA, 100 bp, synthetic construct
  source 1..100: mol_type = other DNA
ctggtgtgccctctgatgtaagctaccccattctacagtaggactgagcactgccgagctgggcaatcttgagtcggatggcagcattgggatacagtgt

SEQ ID NO: 2975 - DNA, 100 bp, synthetic construct
  source 1..100: mol_type = other DNA
ctggtgtgccctctgatgtttgctaggccattctacagtaggactgagcactgccgagctgggcaatcttgagtcggatggcagcattgggatacagtgt

SEQ ID NO: 2976 - DNA, 100 bp, synthetic construct
  source 1..100: mol_type = other DNA
ctggtgtgccctctgatgttttttaggggattctacagtaggactgagcactgccgagctgggcaatcttgagtcggatggcagcattgggatacagtgt

SEQ ID NO: 2977 - DNA, 100 bp, synthetic construct; identical to SEQ ID NO: 2969
  source 1..100: mol_type = other DNA

SEQ ID NO: 2978 - DNA, 100 bp, synthetic construct
  source 1..100: mol_type = other DNA
ctggtgtgccctctgatgtttttatccggtgagtacagtaggactgagcactgccgagctgggcaatcttgagtcggatggcagcattgggatacagtgt

SEQ ID NO: 2979 - DNA, 100 bp, synthetic construct
  source 1..100: mol_type = other DNA
ctggtgtgccctctgatgtttttatcccctgagatcagtaggactgagcactgccgagctgggcaatcttgagtcggatggcagcattgggatacagtgt

SEQ ID NO: 2980 - DNA, 100 bp, synthetic construct
  source 1..100: mol_type = other DNA
ctggtgtgccctctgatgtttttatccccatagatgtgtaggactgagcactgccgagctgggcaatcttgagtcggatggcagcattgggatacagtgt

SEQ ID NO: 2981 - DNA, 100 bp, synthetic construct
  source 1..100: mol_type = other DNA
ctggtgtgccctctgatccaagcatccccattctacagtaggactgagcactgccgagctgggcaatctttgcaatgatggcaggtgaccgatacagtgt

SEQ ID NO: 2982 - DNA, 100 bp, synthetic construct
  source 1..100: mol_type = other DNA
ctggtgtgccctctgatccaagcatccccattctacagtaggactgagcactgccgagctgggcaatctttgcaatgatgggtcgtgtgggatacagtgt

SEQ ID NO: 2983 - DNA, 100 bp, synthetic construct
  source 1..100: mol_type = other DNA
ctggtgtgccctctgatccaagcatccccattctacagtaggactgagcactgccgagctgggcaatctttgcaatgaaccgtccattgggatacagtgt

SEQ ID NO: 2984 - DNA, 100 bp, synthetic construct
  source 1..100: mol_type = other DNA
ctggtgtgccctctgatccaagcatccccattctacagtaggactgagcactgccgagctgggcaatctttgcaatctaccgagcattgggatacagtgt

SEQ ID NO: 2985 - DNA, 100 bp, synthetic construct
  source 1..100: mol_type = other DNA
ctggtgtgccctctgatccaagcatccccattctacagtaggactgagcactgccgagctgggcaatctttgcacgctacgcagcattgggatacagtgt

SEQ ID NO: 2986 - DNA, 100 bp, synthetic construct
  source 1..100: mol_type = other DNA
ctggtgtgccctctgatccaagcatccccattctacagtaggactgagcactgccgagctgggcaatctttggtcgcttggcagcattgggatacagtgt

SEQ ID NO: 2987 - DNA, 100 bp, synthetic construct; identical to SEQ ID NO: 2973
  source 1..100: mol_type = other DNA

SEQ ID NO: 2988 - DNA, 100 bp, synthetic construct
  source 1..100: mol_type = other DNA
ctggtgtgccctctgatccaagcatccccattctacagtaggactgagcactgccgagctgggcaatgaagagaatgatggcagcattgggatacagtgt

SEQ ID NO: 2989 - DNA, 90 bp, synthetic construct
  source 1..90: mol_type = other DNA
ctggtgtgccctctgatccaagcatccccattctacagtaggactgagcactgccgagctgggcaatcttgagtcggatggcagcattgg

SEQ ID NO: 2990 - DNA, 92 bp, synthetic construct
  source 1..92: mol_type = other DNA
ctggtgtgccctctgatccaagcatccccattctacagtaggactgagcactgccgagctgggcaatcttgagtcggatggcagcattggga

SEQ ID NO: 2991 - DNA, 94 bp, synthetic construct
  source 1..94: mol_type = other DNA
ctggtgtgccctctgatccaagcatccccattctacagtaggactgagcactgccgagctgggcaatcttgagtcggatggcagcattgggata

SEQ ID NO: 2992 - DNA, 96 bp, synthetic construct
  source 1..96: mol_type = other DNA
ctggtgtgccctctgatccaagcatccccattctacagtaggactgagcactgccgagctgggcaatcttgagtcggatggcagcattgggataca

SEQ ID NO: 2993 - DNA, 98 bp, synthetic construct
  source 1..98: mol_type = other DNA
ctggtgtgccctctgatccaagcatccccattctacagtaggactgagcactgccgagctgggcaatcttgagtcggatggcagcattgggatacagt

SEQ ID NO: 2994 - DNA, 90 bp, synthetic construct
  source 1..90: mol_type = other DNA
ctctgatccaagcatccccattctacagtaggactgagcactgccgagctgggcaatcttgagtcggatggcagcattgggatacagtgt

SEQ ID NO: 2995 - DNA, 92 bp, synthetic construct
  source 1..92: mol_type = other DNA
ccctctgatccaagcatccccattctacagtaggactgagcactgccgagctgggcaatcttgagtcggatggcagcattgggatacagtgt

SEQ ID NO: 2996 - DNA, 94 bp, synthetic construct
  source 1..94: mol_type = other DNA
tgccctctgatccaagcatccccattctacagtaggactgagcactgccgagctgggcaatcttgagtcggatggcagcattgggatacagtgt

SEQ ID NO: 2997 - DNA, 96 bp, synthetic construct
  source 1..96: mol_type = other DNA
tgtgccctctgatccaagcatccccattctacagtaggactgagcactgccgagctgggcaatcttgagtcggatggcagcattgggatacagtgt

SEQ ID NO: 2998 - DNA, 98 bp, synthetic construct
  source 1..98: mol_type = other DNA
ggtgtgccctctgatccaagcatccccattctacagtaggactgagcactgccgagctgggcaatcttgagtcggatggcagcattgggatacagtgt

SEQ ID NO: 2999 - DNA, 100 bp, synthetic construct; identical to SEQ ID NO: 2973
  source 1..100: mol_type = other DNA

SEQ ID NO: 3000 - DNA, 113 bp, synthetic construct; identical to SEQ ID NO: 159
  source 1..113: mol_type = other DNA

SEQ ID NO: 3001 - DNA, 113 bp, synthetic construct; identical to SEQ ID NO: 160
  source 1..113: mol_type = other DNA

SEQ ID NO: 3002 - DNA, 113 bp, synthetic construct; identical to SEQ ID NO: 161
  source 1..113: mol_type = other DNA

SEQ ID NO: 3003 - DNA, 113 bp, synthetic construct; identical to SEQ ID NO: 162
  source 1..113: mol_type = other DNA

SEQ ID NO: 3004 - DNA, 113 bp, synthetic construct; identical to SEQ ID NO: 163
  source 1..113: mol_type = other DNA

SEQ ID NO: 3005 - DNA, 113 bp, synthetic construct; identical to SEQ ID NO: 164
  source 1..113: mol_type = other DNA

SEQ ID NO: 3006 - DNA, 113 bp, synthetic construct; identical to SEQ ID NO: 165
  source 1..113: mol_type = other DNA

SEQ ID NO: 3007 - skipped

SEQ ID NO: 3008 - DNA, 113 bp, synthetic construct; identical to SEQ ID NO: 167
  source 1..113: mol_type = other DNA

SEQ ID NO: 3009 - DNA, 100 bp, synthetic construct
  source 1..100: mol_type = other DNA
aacttcaggtgcacgaaaccctggtgtgccctctgatgtttttatgaggcgtctacagcagttcggaggaatcccgaggtcagcaagactaacaatgatg

SEQ ID NO: 3010 - DNA, 100 bp, synthetic construct
  source 1..100: mol_type = other DNA
caggtgcacgaaaccctggtgtgccctctgatgtttttatgaggcgtctacagcagttcggaggaatcccgaggtcagcaagactaacaatgatggcagc

SEQ ID NO: 3011 - DNA, 100 bp, synthetic construct
  source 1..100: mol_type = other DNA
gcacgaaaccctggtgtgccctctgatgtttttatgaggcgtctacagcagttcggaggaatcccgaggtcagcaagactaacaatgatggcagcattgg

SEQ ID NO: 3012 - DNA, 100 bp, synthetic construct
  source 1..100: mol_type = other DNA
aaaccctggtgtgccctctgatgtttttatgaggcgtctacagcagttcggaggaatcccgaggtcagcaagactaacaatgatggcagcattgggatac

SEQ ID NO: 3013 - DNA, 100 bp, synthetic construct
  source 1..100: mol_type = other DNA
ctggtgtgccctctgatgtttttatgaggcgtctacagcagttcggaggaatcccgaggtcagcaagactaacaatgatggcagcattgggatacagtgt

SEQ ID NO: 3014 - DNA, 100 bp, synthetic construct
  source 1..100: mol_type = other DNA
gtgccctctgatgtttttatgaggcgtctacagcagttcggaggaatcccgaggtcagcaagactaacaatgatggcagcattgggatacagtgtgaaaa

SEQ ID NO: 3015 - skipped

SEQ ID NO: 3016 - DNA, 100 bp, synthetic construct
  source 1..100: mol_type = other DNA
gtgccctctgtacaaattatccccattctacagcagttcggaggaatcccgaggtcagcaagactaacaatgatggcagcattgggatacagtgtgaaaa

SEQ ID NO: 3017 - DNA, 100 bp, synthetic construct
  source 1..100: mol_type = other DNA
gtgccctctgatcaaagcatccccattctacagcagttcggaggaatcccgaggtcagcaagactaacaatgatggcagcattgggatacagtgtgaaaa

SEQ ID NO: 3018 - DNA, 100 bp, synthetic construct
  source 1..100: mol_type = other DNA
gtgccctctgatgtaagctaccccattctacagcagttcggaggaatcccgaggtcagcaagactaacaatgatggcagcattgggatacagtgtgaaaa

SEQ ID NO: 3019 - DNA, 100 bp, synthetic construct
  source 1..100: mol_type = other DNA
gtgccctctgatgtttgctagaccattctacagcagttcggaggaatcccgaggtcagcaagactaacaatgatggcagcattgggatacagtgtgaaaa

SEQ ID NO: 3020 - DNA, 100 bp, synthetic construct
  source 1..100: mol_type = other DNA
gtgccctctgatgttttttagaggattctacagcagttcggaggaatcccgaggtcagcaagactaacaatgatggcagcattgggatacagtgtgaaaa

SEQ ID NO: 3021 - DNA, 100 bp, synthetic construct; identical to SEQ ID NO: 3014
  source 1..100: mol_type = other DNA

SEQ ID NO: 3022 - DNA, 100 bp, synthetic construct
  source 1..100: mol_type = other DNA
gtgccctctgatgtttttatccggcgagtacagcagttcggaggaatcccgaggtcagcaagactaacaatgatggcagcattgggatacagtgtgaaaa

SEQ ID NO: 3023 - DNA, 100 bp, synthetic construct
  source 1..100: mol_type = other DNA
gtgccctctgatgtttttatcccccgagatcagcagttcggaggaatcccgaggtcagcaagactaacaatgatggcagcattgggatacagtgtgaaaa

SEQ ID NO: 3024 - DNA, 100 bp, synthetic construct
  source 1..100: mol_type = other DNA
gtgccctctgatgtttttatccccatagatgtgcagttcggaggaatcccgaggtcagcaagactaacaatgatggcagcattgggatacagtgtgaaaa

SEQ ID NO: 3025 - DNA, 100 bp, synthetic construct
  source 1..100: mol_type = other DNA
gtgccctctgatgtttttatccggcgagtacagcagttcggaggaatcccgaggtcagcaatctttgcaatgaaccgtccattgggatacagtgtgaaaa

SEQ ID NO: 3026 - DNA, 100 bp, synthetic construct
  source 1..100: mol_type = other DNA
gtgccctctgatgtttttatccggcgagtacagcagttcggaggaatcccgaggtcagcaatctttgcaatctaccgagcattgggatacagtgtgaaaa

SEQ ID NO: 3027 - DNA, 100 bp, synthetic construct
  source 1..100: mol_type = other DNA
gtgccctctgatgtttttatccggcgagtacagcagttcggaggaatcccgaggtcagcaatctttgcatactacgcagcattgggatacagtgtgaaaa

SEQ ID NO: 3028 - DNA, 100 bp, synthetic construct
  source 1..100: mol_type = other DNA
gtgccctctgatgtttttatccggcgagtacagcagttcggaggaatcccgaggtcagcaatctttggttacttggcagcattgggatacagtgtgaaaa

SEQ ID NO: 3029 - DNA, 100 bp, synthetic construct
  source 1..100: mol_type = other DNA
gtgccctctgatgtttttatccggcgagtacagcagttcggaggaatcccgaggtcagcaatcttaagttagatggcagcattgggatacagtgtgaaaa

SEQ ID NO: 3030 - DNA, 100 bp, synthetic construct
  source 1..100: mol_type = other DNA
gtgccctctgatgtttttatccggcgagtacagcagttcggaggaatcccgaggtcagcaatcctaagtatgatggcagcattgggatacagtgtgaaaa

SEQ ID NO: 3031 - DNA, 100 bp, synthetic construct; identical to SEQ ID NO: 3022
  source 1..100: mol_type = other DNA

SEQ ID NO: 3032 - DNA, 100 bp, synthetic construct
  source 1..100: mol_type = other DNA
gtgccctctgatgtttttatccggcgagtacagcagttcggaggaatcccgaggtcaggttgacttgcaatgatggcagcattgggatacagtgtgaaaa

SEQ ID NO: 3033 - DNA, 100 bp, synthetic construct
  source 1..100: mol_type = other DNA
gtgccctctgatgtttttatccggcgagtacagcagttcggaggaatcccgaggtctcgttgctttgcaatgatggcagcattgggatacagtgtgaaaa

SEQ ID NO: 3034 - DNA, 90 bp, synthetic construct
  source 1..90: mol_type = other DNA
gtgccctctgatgtttttatccggcgagtacagcagttcggaggaatcccgaggtcagcaatcctaagtatgatggcagcattgggatac

SEQ ID NO: 3035 - DNA, 92 bp, synthetic construct
  source 1..92: mol_type = other DNA
gtgccctctgatgtttttatccggcgagtacagcagttcggaggaatcccgaggtcagcaatcctaagtatgatggcagcattgggatacag

SEQ ID NO: 3036 - DNA, 94 bp, synthetic construct
  source 1..94: mol_type = other DNA
gtgccctctgatgtttttatccggcgagtacagcagttcggaggaatcccgaggtcagcaatcctaagtatgatggcagcattgggatacagtg

SEQ ID NO: 3037 - DNA, 96 bp, synthetic construct
  source 1..96: mol_type = other DNA
gtgccctctgatgtttttatccggcgagtacagcagttcggaggaatcccgaggtcagcaatcctaagtatgatggcagcattgggatacagtgtg

SEQ ID NO: 3038 - DNA, 98 bp, synthetic construct
  source 1..98: mol_type = other DNA
gtgccctctgatgtttttatccggcgagtacagcagttcggaggaatcccgaggtcagcaatcctaagtatgatggcagcattgggatacagtgtgaa

SEQ ID NO: 3039 - DNA, 90 bp, synthetic construct
  source 1..90: mol_type = other DNA
atgtttttatccggcgagtacagcagttcggaggaatcccgaggtcagcaatcctaagtatgatggcagcattgggatacagtgtgaaaa

SEQ ID NO: 3040 - DNA, 92 bp, synthetic construct
  source 1..92: mol_type = other DNA
tgatgtttttatccggcgagtacagcagttcggaggaatcccgaggtcagcaatcctaagtatgatggcagcattgggatacagtgtgaaaa

SEQ ID NO: 3041 - DNA, 94 bp, synthetic construct
  source 1..94: mol_type = other DNA
tctgatgtttttatccggcgagtacagcagttcggaggaatcccgaggtcagcaatcctaagtatgatggcagcattgggatacagtgtgaaaa

SEQ ID NO: 3042 - DNA, 96 bp, synthetic construct
  source 1..96: mol_type = other DNA
cctctgatgtttttatccggcgagtacagcagttcggaggaatcccgaggtcagcaatcctaagtatgatggcagcattgggatacagtgtgaaaa

SEQ ID NO: 3043 - DNA, 98 bp, synthetic construct
  source 1..98: mol_type = other DNA
gccctctgatgtttttatccggcgagtacagcagttcggaggaatcccgaggtcagcaatcctaagtatgatggcagcattgggatacagtgtgaaaa

SEQ ID NO: 3044 - DNA, 100 bp, synthetic construct; identical to SEQ ID NO: 3030
  source 1..100: mol_type = other DNA

SEQ ID NO: 3045 - DNA, 113 bp, synthetic construct; identical to SEQ ID NO: 153
  source 1..113: mol_type = other DNA

SEQ ID NO: 3046 - DNA, 113 bp, synthetic construct; identical to SEQ ID NO: 152
  source 1..113: mol_type = other DNA

SEQ ID NO: 3047 - DNA, 113 bp, synthetic construct; identical to SEQ ID NO: 151
  source 1..113: mol_type = other DNA

SEQ ID NO: 3048 - DNA, 113 bp, synthetic construct; identical to SEQ ID NO: 156
  source 1..113: mol_type = other DNA

SEQ ID NO: 3049 - DNA, 113 bp, synthetic construct; identical to SEQ ID NO: 155
  source 1..113: mol_type = other DNA

SEQ ID NO: 3050 - DNA, 113 bp, synthetic construct; identical to SEQ ID NO: 154
  source 1..113: mol_type = other DNA

SEQ ID NO: 3051 - DNA, 100 bp, synthetic construct
  source 1..100: mol_type = other DNA
caggtgcacgaaaccctggtgtgccctctgatgtttttctggtgattctacaacagtactgagctatcccgaattcaacaatctttgcaataagcgaagc

SEQ ID NO: 3052 - DNA, 100 bp, synthetic construct
  source 1..100: mol_type = other DNA
gcacgaaaccctggtgtgccctctgatgtttttctggtgattctacaacagtactgagctatcccgaattcaacaatctttgcaataagcgaagcattgg

SEQ ID NO: 3053 - DNA, 100 bp, synthetic construct
  source 1..100: mol_type = other DNA
aaaccctggtgtgccctctgatgtttttctggtgattctacaacagtactgagctatcccgaattcaacaatctttgcaataagcgaagcattgggatac

SEQ ID NO: 3054 - DNA, 100 bp, synthetic construct
  source 1..100: mol_type = other DNA
ctggtgtgccctctgatgtttttctggtgattctacaacagtactgagctatcccgaattcaacaatctttgcaataagcgaagcattgggatacagtgt

SEQ ID NO: 3055 - DNA, 100 bp, synthetic construct
  source 1..100: mol_type = other DNA
gtgccctctgatgtttttctggtgattctacaacagtactgagctatcccgaattcaacaatctttgcaataagcgaagcattgggatacagtgtgaaaa

SEQ ID NO: 3056 - DNA, 113 bp, synthetic construct; identical to SEQ ID NO: 154
  source 1..113: mol_type = other DNA

SEQ ID NO: 3057 - DNA, 100 bp, synthetic construct
  source 1..100: mol_type = other DNA
gcacgaaaccctggtgtgccctctgtacaaattatccccattctacaacagtactgagctatcccgaattcaacaatctttgcaataagcgaagcattgg

SEQ ID NO: 3058 - DNA, 100 bp, synthetic construct
  source 1..100: mol_type = other DNA
gcacgaaaccctggtgtgccctctgatcaaaaaatccccattctacaacagtactgagctatcccgaattcaacaatctttgcaataagcgaagcattgg

SEQ ID NO: 3059 - DNA, 100 bp, synthetic construct
  source 1..100: mol_type = other DNA
gcacgaaaccctggtgtgccctctgatgtaaaatgccccattctacaacagtactgagctatcccgaattcaacaatctttgcaataagcgaagcattgg

SEQ ID NO: 3060 - DNA, 100 bp, synthetic construct
  source 1..100: mol_type = other DNA
gcacgaaaccctggtgtgccctctgatgtttaatgggccattctacaacagtactgagctatcccgaattcaacaatctttgcaataagcgaagcattgg

SEQ ID NO: 3061 - DNA, 100 bp, synthetic construct
  source 1..100: mol_type = other DNA
gcacgaaaccctggtgtgccctctgatgttttttgggtgattctacaacagtactgagctatcccgaattcaacaatctttgcaataagcgaagcattgg

SEQ ID NO: 3062 - DNA, 100 bp, synthetic construct; identical to SEQ ID NO: 3052
  source 1..100: mol_type = other DNA

SEQ ID NO: 3063 - DNA, 100 bp, synthetic construct
  source 1..100: mol_type = other DNA
gcacgaaaccctggtgtgccctctgatgtttttatggtgtatctacaacagtactgagctatcccgaattcaacaatctttgcaataagcgaagcattgg

SEQ ID NO: 3064 - DNA, 100 bp, synthetic construct
  source 1..100: mol_type = other DNA
gcacgaaaccctggtgtgccctctgatgtttttatccggtaggtacaacagtactgagctatcccgaattcaacaatctttgcaataagcgaagcattgg

SEQ ID NO: 3065 - DNA, 100 bp, synthetic construct
  source 1..100: mol_type = other DNA
gcacgaaaccctggtgtgccctctgatgtttttatcccctaggatcaacagtactgagctatcccgaattcaacaatctttgcaataagcgaagcattgg

SEQ ID NO: 3066 - DNA, 100 bp, synthetic construct
  source 1..100: mol_type = other DNA
gcacgaaaccctggtgtgccctctgatgttttttgggtgattctacaacagtactgagctatcccgaattcaacaatctttgcaatgatcaatcaattgg

SEQ ID NO: 3067 - DNA, 100 bp, synthetic construct; identical to SEQ ID NO: 3052
  source 1..100: mol_type = other DNA

SEQ ID NO: 3068 - DNA, 100 bp, synthetic construct
  source 1..100: mol_type = other DNA
gcacgaaaccctggtgtgccctctgatgttttttgggtgattctacaacagtactgagctatcccgaattcaacaatctttgcacaaagcgcagcattgg

SEQ ID NO: 3069 - DNA, 100 bp, synthetic construct
  source 1..100: mol_type = other DNA
gcacgaaaccctggtgtgccctctgatgttttttgggtgattctacaacagtactgagctatcccgaattcaacaatctttggtcaattggcagcattgg

SEQ ID NO: 3070 - DNA, 100 bp, synthetic construct
  source 1..100: mol_type = other DNA
gcacgaaaccctggtgtgccctctgatgttttttgggtgattctacaacagtactgagctatcccgaattcaacaatcttaagtcagatggcagcattgg

SEQ ID NO: 3071 - DNA, 100 bp, synthetic construct
  source 1..100: mol_type = other DNA
gcacgaaaccctggtgtgccctctgatgttttttgggtgattctacaacagtactgagctatcccgaattcaacaatcaaaagtatgatggcagcattgg

SEQ ID NO: 3072 - DNA, 113 bp, synthetic construct; identical to SEQ ID NO: 143
  source 1..113: mol_type = other DNA

SEQ ID NO: 3073 - DNA, 113 bp, synthetic construct; identical to SEQ ID NO: 135
  source 1..113: mol_type = other DNA

SEQ ID NO: 3074 - DNA, 113 bp, synthetic construct; identical to SEQ ID NO: 134
  source 1..113: mol_type = other DNA

SEQ ID NO: 3075 - DNA, 113 bp, synthetic construct; identical to SEQ ID NO: 133
  source 1..113: mol_type = other DNA

SEQ ID NO: 3076 - DNA, 113 bp, synthetic construct; identical to SEQ ID NO: 132
  source 1..113: mol_type = other DNA

SEQ ID NO: 3077 - DNA, 113 bp, synthetic construct; identical to SEQ ID NO: 131
  source 1..113: mol_type = other DNA

SEQ ID NO: 3078 - DNA, 113 bp, synthetic construct; identical to SEQ ID NO: 130
  source 1..113: mol_type = other DNA

SEQ ID NO: 3079 - DNA, 393 bp, synthetic construct
  source 1..393: mol_type = other DNA
taaggaccagcttctttgggagagaacagacgcaggggcgggagggaaaaagggagaggcagacgtcacttcctcttggcgactctggcagcagattggtcggttgagtggcagaaaggcagacggggactgggcaaggcactgtcggtgacatcacggacagggcgacttctatgtagatgaggcagcgcagaggctgctgcttcgccacttgctgcttcgccacgaagggagttcccgtgccctgggagcgggttcaggaccgctgatcggaagtgagaatcccagctgtgtgtcagggctggaaagggctcgggagtgcgcggggcaagtgaccgtgtgtgtaaagagtgaggcgtatgaggctgtgtcggggcagagcccgaagatctc

SEQ ID NO: 3080 - DNA, 11 bp, synthetic construct
  source 1..11: mol_type = other DNA
aatttttggag

SEQ ID NO: 3081 - DNA, 113 bp, synthetic construct; identical to SEQ ID NO: 2846
  source 1..113: mol_type = other DNA

SEQ ID NO: 3082 - DNA, 113 bp, synthetic construct; identical to SEQ ID NO: 2845
  source 1..113: mol_type = other DNA

SEQ ID NO: 3083 - DNA, 95 bp, synthetic construct
  source 1..95: mol_type = other DNA
atgggtatggcctctaaaccccgagccccagcagcttcagtcccttactcgtcgatggtgtaaaaagccttatgcacggcctggaggggagagaa

SEQ ID NO: 3084 - DNA, 95 bp, synthetic construct
  source 1..95: mol_type = other DNA
atgggtatggcctctaaaatgtcccccccagcagcttcagtcccttactcgtcgatggtgctataagccttatgcacggcctggaggggagagaa

SEQ ID NO: 3085 - DNA, 95 bp, synthetic construct
  source 1..95: mol_type = other DNA
atgggtatggcctctaccctgttggccccagcagcttcagtcccttactcgtcgatgaagacgacagccttatgcacggcctggaggggagagaa

SEQ ID NO: 3086 - DNA, 100 bp, synthetic construct
  source 1..100: mol_type = other DNA
catggccccagcagcttcagtccctttcttgtcgatggtcagcacagccctatgcacggcctggaggggagagaagcagagacacgttgtaaggctgatc

SEQ ID NO: 3087 - DNA, 100 bp, synthetic construct
  source 1..100: mol_type = other DNA
gccttcgggcatggcggacttgaagaagtcgtgctgcttcatgtggtcggggtagcggctgaagcactgcactccgtaggtcagggtcgtcacgagggtc

SEQ ID NO: 3088 - DNA, 100 bp, synthetic construct
  source 1..100: mol_type = other DNA
aagtcgtgctgcttcatgtggtcggggtagcggctgaagcactgcactccgtaggtcagggtcgtcacgagggtcggccagggcacgggcagcttgccgg

SEQ ID NO: 3089 - DNA, 100 bp, synthetic construct
  source 1..100: mol_type = other DNA
ggtagcggctgaagcactgcactccgtaggtcagggtcgtcacgagggtcggccagggcacgggcagcttgccggtggtgcagatgaacttcagggtcag

SEQ ID NO: 3090 - DNA, 100 bp, synthetic construct
  source 1..100: mol_type = other DNA
gccttcgggcatggcggacttgaagaagtcgtgctgcttcatgtggtcggggtagcgcctgaagcactggacagccctcgtctgggtcgtcacgagggtc

SEQ ID NO: 3091 - DNA, 100 bp, synthetic construct
  source 1..100: mol_type = other DNA
gccttcgggcatggcggacttgaagaagtcgtgctgcttcatgtggtcggggtagcggctgatcaactccacagccaaggtcagggtcgtcacgagggtc

SEQ ID NO: 3092 - DNA, 100 bp, synthetic construct
  source 1..100: mol_type = other DNA
gccttcgggcatggcggacttgaagaagtcgtgctgcttcatgtggtcggggtagcggctgtagcactgccctcccatccacagggtcgtcacgagggtc

SEQ ID NO: 3093 - DNA, 100 bp, synthetic construct
  source 1..100: mol_type = other DNA
gccttcgggcatggcggacttgaagaagtcgtgctgcttcatgtggtcggggtagcggctgaaggactcgtctcccaaggtctgggtcgtcacgagggtc

SEQ ID NO: 3094 - DNA, 100 bp, synthetic construct
  source 1..100: mol_type = other DNA
aagtcgtgctgcttcatgtggtcggggtagcgcctgaagcactggacagccctcgtctgggtcgtcacgagggtcggccagggcacgggcagcttgccgg

SEQ ID NO: 3095 - DNA, 100 bp, synthetic construct
  source 1..100: mol_type = other DNA
aagtcgtgctgcttcatgtggtcggggtagcggctgatcaactccacagccaaggtcagggtcgtcacgagggtcggccagggcacgggcagcttgccgg

SEQ ID NO: 3096 - DNA, 100 bp, synthetic construct
  source 1..100: mol_type = other DNA
aagtcgtgctgcttcatgtggtcggggtagcggctgtagcactgccctcccatccacagggtcgtcacgagggtcggccagggcacgggcagcttgccgg

SEQ ID NO: 3097 - DNA, 100 bp, synthetic construct
  source 1..100: mol_type = other DNA
aagtcgtgctgcttcatgtggtcggggtagcggctgaaggactcgtctcccaaggtctgggtcgtcacgagggtcggccagggcacgggcagcttgccgg

SEQ ID NO: 3098 - DNA, 100 bp, synthetic construct
  source 1..100: mol_type = other DNA
ggtagcggctgaacgtgaccactccgtaggtcagggtcgtcacgagggtcggcctcccgtcgggcagcttgccggtggtgcagatgaacttcagggtcag

SEQ ID NO: 3099 - DNA, 100 bp, synthetic construct
  source 1..100: mol_type = other DNA
ggtagcggctgaaggtgacgactccgtaggtcagggtcgtcacgagggtcggcctcccgtcgggcagcttgccggtggtgcagatgaacttcagggtcag

SEQ ID NO: 3100 - DNA, 100 bp, synthetic construct
  source 1..100: mol_type = other DNA
gccttcgggcatggcggacttgaagaagtcgtgctgcttgtacacgtcggggtagcggctgaagcactgcactccgtaggagtccctcgtcacgagggtc

SEQ ID NO: 3101 - DNA, 100 bp, synthetic construct
  source 1..100: mol_type = other DNA
aagtcgtgctgcttgtacacgtcggggtagcggctgaagcactgcactccgtaggagtccctcgtcacgagggtcggccagggcacgggcagcttgccgg

SEQ ID NO: 3102 - DNA, 100 bp, synthetic construct
  source 1..100: mol_type = other DNA
gccttcgggcatggcggacttgaagaagtcgtgctgcttgtacacgtcggggtagcggctgaagcactgcactccgtagtaatccgtcgtcacgagggtc

SEQ ID NO: 3103 - DNA, 26 bp, synthetic construct
  source 1..26: mol_type = other DNA
tgtccattactggaacctatgatctg

SEQ ID NO: 3104 - DNA, 25 bp, synthetic construct
  source 1..25: mol_type = other DNA
gattcaccacttttcccatgaagag

SEQ ID NO: 3105 - RNA, 274 nt, synthetic construct
  source 1..274: mol_type = other RNA
ggccatcagtcgccggtcccaagcccggataaaatgggagggggcgggaaaccgcctaaccatgccgactgatggcagataatctggtgtgccctctgatccaagcatccccattctacagtaggactgagcactgccgagctgggcaatcttgagtcggatggcagcattgggatacagtatatactgccatcagtcggcgtggactgtagaacactgccaatgccggtcccaagcccggataaaagtggagggtacagtccacgcttttttt

SEQ ID NO: 3106 - RNA, 272 nt, synthetic construct
  source 1..272: mol_type = other RNA
ggccatcagtcgccggtcccaagcccggataaaatgggagggggcgggaaaccgcctaaccatgccgactgatggcagataatgtgccctctgatgtttttatccggcgagtacagcagttcggaggaatcccgaggtcagcaatcctaagtatgatggcagcattgggatacagtgtgatatactgccatcagtcggcgtggactgtagaacactgccaatgccggtcccaagcccggataaaagtggagggtacagtccacgcttttttt

SEQ ID NO: 3107 - RNA, 374 nt, synthetic construct
  source 1..374: mol_type = other RNA
ggccatcagtcgccggtcccaagcccggataaaatgggagggggcgggaaaccgcctaaccatgccgactgatggcagataatctgttggttataaatgacatttcctctggcaacttcaggtgcacgaaaccctggtgtgccctctgatccaagcatccccattctacagtaggactgagcactgccgagctgggcaatcttgagtcggatggcagcattgggatacagtgtgaaaagcagcacattgtggggtttcaggtatcggtatataatcatggcatatactgccatcagtcggcgtggactgtagaacactgccaatgccggtcccaagcccggataaaagtggagggtacagtccacgcttttttt

SEQ ID NO: 3108 - RNA, 374 nt, synthetic construct
  source 1..374: mol_type = other RNA
ggccatcagtcgccggtcccaagcccggataaaatgggagggggcgggaaaccgcctaaccatgccgactgatggcagataatctgttggttataaatgacatttcctgaccgtacttcaggtgcacgattgggaggtgtgccctctgatccaagcatccccattctacagtaggactgagcactgccgagctgggcaatcttgagtcggatggcagcattgggtatgtctgtgaaaagcagcactaacacgggtttcaggtatcggtatataatcatggcatatactgccatcagtcggcgtggactgtagaacactgccaatgccggtcccaagcccggataaaagtggagggtacagtccacgcttttttt

SEQ ID NO: 3109 - RNA, 372 nt, synthetic construct
  source 1..372: mol_type = other RNA
ggccatcagtcgccggtcccaagcccggataaaatgggagggggcgggaaaccgcctaaccatgccgactgatggcagataatggttataaatgacatttcctctggcaacttcaggtgcacgaaaccctggtgtgccctctgatgttgttatccggcgagtacagcagttcggaggaatcccgaggtcagcaatcctaagtatgatggcagcattgggatacagtgtgaaaagcagcacattgtggggtttcaggtatcggtatataatcatggctgaatatactgccatcagtcggcgtggactgtagaacactgccaatgccggtcccaagcccggataaaagtggagggtacagtccacgcttttttt

SEQ ID NO: 3110 - RNA, 372 nt, synthetic construct
  source 1..372: mol_type = other RNA
ggccatcagtcgccggtcccaagcccggataaaatgggagggggcgggaaaccgcctaaccatgccgactgatggcagataatggttataaatgacatttcctctggcaacttgtccaccacgaaaccctggtgacgggactgatgttgttatccggcgagtacagcagttcggaggaatcccgaggtcagcaatcctaagtatgatggcagcattgcctatgagtgtgaaaagcagctgtaactggggtttcaggtatcggtatataatcatggctgaatatactgccatcagtcggcgtggactgtagaacactgccaatgccggtcccaagcccggataaaagtggagggtacagtccacgcttttttt

SEQ ID NO: 3111 - RNA, 304 nt, synthetic construct
  source 1..304: mol_type = other RNA
ggccatcagtcgccggtcccaagcccggataaaatgggagggggcgggaaaccgcctaaccatgccgactgatggcagataatcaggtgcacgaaaccctggtgtgccctctgatccaagcatccccattctacagtaggactgagcactgccgagctgggcaatcttgagtcggatggcagcattgggatacagtgtgaaaagcagcacaatatactgccatcagtcggcgtggactgtagaacactgccaatgccggtcccaagcccggataaaagtggagggtacagtccacgcttttttt

SEQ ID NO: 3112 - RNA, 334 nt, synthetic construct
  source 1..334: mol_type = other RNA
ggccatcagtcgccggtcccaagcccggataaaatgggagggggcgggaaaccgcctaaccatgccgactgatggcagataatttcctctggcaacttcaggtgcacgaaaccctggtgtgccctctgatccaagcatccccattctacagtaggactgagcactgccgagctgggcaatcttgagtcggatggcagcattgggatacagtgtgaaaagcagcacattgtggggtttcaggatatactgccatcagtcggcgtggactgtagaacactgccaatgccggtcccaagcccggataaaagtggagggtacagtccacgcttttttt

SEQ ID NO: 3113 - RNA, 302 nt, synthetic construct
  source 1..302: mol_type = other RNA
ggccatcagtcgccggtcccaagcccggataaaatgggagggggcgggaaaccgcctaaccatgccgactgatggcagataatgcacgaaaccctggtgtgccctctgatgttgttatccggcgagtacagcagttcggaggaatcccgaggtcagcaatcctaagtatgatggcagcattgggatacagtgtgaaaagcagcacattgatatactgccatcagtcggcgtggactgtagaacactgccaatgccggtcccaagcccggataaaagtggagggtacagtccacgcttttttt

SEQ ID NO: 3114 - RNA, 332 nt, synthetic construct
  source 1..332: mol_type = other RNA
ggccatcagtcgccggtcccaagcccggataaaatgggagggggcgggaaaccgcctaaccatgccgactgatggcagataatctggcaacttcaggtgcacgaaaccctggtgtgccctctgatgttgttatccggcgagtacagcagttcggaggaatcccgaggtcagcaatcctaagtatgatggcagcattgggatacagtgtgaaaagcagcacattgtggggtttcaggtctatatactgccatcagtcggcgtggactgtagaacactgccaatgccggtcccaagcccggataaaagtggagggtacagtccacgcttttttt

SEQ ID NO: 3115 - RNA, 372 nt, synthetic construct
  source 1..372: mol_type = other RNA
ggccatcagtcgccggtcccaagcccggataaaatgggagggggcgggaaaccgcctaaccatgccgactgatggcagataatggttataaatgacatttcctctggcaacttcaggtgcacgaaaccctggtgacgggactgatgttgttatccggcgagtacagcagttcggaggaatcccgaggtcagcaatcctaagtatgatggcagcattgcctatgagtgtgaaaagcagcacattgtggggtttcaggtatcggtatataatcatggctgaatatactgccatcagtcggcgtggactgtagaacactgccaatgccggtcccaagcccggataaaagtggagggtacagtccacgcttttttt

SEQ ID NO: 3116 - RNA, 364 nt, synthetic construct
  source 1..364: mol_type = other RNA
ggccatcagtcgccggtcccaagcccggataaaatgggagggggcgggaaaccgcctaaccatgccgactgatggcagataatggttataaatgacatttcctctggcaaccaggtgcacgaaaccctggtgacgggactgatgttgttatccggcgagtacagcagttcggaggaatcccgaggtcagcaatcctaagtatgatggcagcattgcctatgagtgtgaaaagcagcacattgtggggcaggatcggataaatcatggctgaatatactgccatcagtcggcgtggactgtagaacactgccaatgccggtcccaagcccggataaaagtggagggtacagtccacgcttttttt

SEQ ID NO: 3117 - DNA, 20 bp, synthetic construct
  source 1..20: mol_type = other DNA
acaaagccagcctcactaga

SEQ ID NO: 3118 - DNA, 20 bp, synthetic construct
  source 1..20: mol_type = other DNA
tcaaagacctgggcagaagt

SEQ ID NO: 3119 - DNA, 21 bp, synthetic construct
  source 1..21: mol_type = other DNA
gtgtgccctctgatgtttttc

SEQ ID NO: 3120 - DNA, 20 bp, synthetic construct
  source 1..20: mol_type = other DNA
cccaatgcttcgcttattgc

SEQ ID NO: 3121 - DNA, 13 bp, synthetic construct
  source 1..13: mol_type = other DNA
  modified_base 1: mod_base = OTHER; note = 5' 6-Fluorescein-acaacagta-ZEN quencher attached to cytidine
  modified_base 13: mod_base = OTHER; note = guanosine-3' Iowa Black FQ
ctgagctatcccg

SEQ ID NO: 3122 - DNA, 22 bp, synthetic construct
  source 1..22: mol_type = other DNA
tgtagttgaggtcaatgaaggg

SEQ ID NO: 3123 - DNA, 19 bp, synthetic construct
  source 1..19: mol_type = other DNA
acatcgctcagacaccatg

SEQ ID NO: 3124 - DNA, 16 bp, synthetic construct
  source 1..16: mol_type = other DNA
  modified_base 1: mod_base = OTHER; note = 5'-hexachlorofluorescein-aaggtcgga-ZEN quencher attached to guanosine
  modified_base 16: mod_base = OTHER; note = cytidine-3' Iowa Black FQ
gtcaacggatttggtc

SEQ ID NO: 3125 - DNA, 56 bp, synthetic construct
  source 1..56: mol_type = other DNA
gccatcagtcgccggtcccaagcccggataaaatgggagggggcgggaaaccgcct

SEQ ID NO: 3126 - RNA, 56 nt, synthetic construct
  source 1..56: mol_type = other RNA
gccatcagtcgccggtcccaagcccggataaaatgggagggggcgggaaaccgcct

SEQ ID NO: 3127 - DNA, 55 bp, synthetic construct
  source 1..55: mol_type = other DNA
aacactgccaatgccggtcccaagcccggataaaagtggagggtacagtccacgc

SEQ ID NO: 3128 - RNA, 55 nt, synthetic construct
  source 1..55: mol_type = other RNA
aacactgccaatgccggtcccaagcccggataaaagtggagggtacagtccacgc

SEQ ID NO: 3129 - DNA, 21 bp, synthetic construct
  source 1..21: mol_type = other DNA
aaccatgccgactgatggcag

SEQ ID NO: 3130 - DNA, 26 bp, synthetic construct
  source 1..26: mol_type = other DNA
gatgtcaggtgcggctgactaccgtc

SEQ ID NO: 3131 - RNA, 21 nt, synthetic construct
  source 1..21: mol_type = other RNA
aaccatgccgactgatggcag

SEQ ID NO: 3132 - RNA, 26 nt, synthetic construct
  source 1..26: mol_type = other RNA
gatgtcaggtgcggctgactaccgtc

SEQ ID NO: 3133 - RNA, 100 nt, synthetic construct
  source 1..100: mol_type = other RNA
catgggtatggcctctaaaaacatggcccctcgtcgttcagtccttactcgtcgatggtcataagttccttatgcacggccttggagagcttcaggggtg

SEQ ID NO: 3134 - RNA, 100 nt, synthetic construct
  source 1..100: mol_type = other RNA
catgggtatggcctctaaaaacatggccggtcgtgcttcagtccttactcgtcgatggtcataagttccttatgcacggccttggagagcttcaggggtg

SEQ ID NO: 3135 - RNA, 100 nt, synthetic construct
  source 1..100: mol_type = other RNA
catgggtatggcctctaaaaacatggagggtccagcttcagtccttactcgtcgatggtcataagttccttatgcacggccttggagagcttcaggggtg

SEQ ID NO: 3136 - RNA, 100 nt, synthetic construct
  source 1..100: mol_type = other RNA
catgggtatggcctctaaaaacatccaggcagcagcttcagtccttactcgtcgatggtcataagttccttatgcacggccttggagagcttcaggggtg

SEQ ID NO: 3137 - RNA, 100 nt, synthetic construct
  source 1..100: mol_type = other RNA
catgggtatggcctctaaaaagtcccacccagcagcttcagtccttactcgtcgatggtcataagttccttatgcacggccttggagagcttcaggggtg

SEQ ID NO: 3138 - RNA, 100 nt, synthetic construct
  source 1..100: mol_type = other RNA
catgggtatggcctctaaattgtccgccccagcagcttcagtccttactcgtcgatggtcataagttccttatgcacggccttggagagcttcaggggtg

SEQ ID NO: 3139 - RNA, 100 nt, synthetic construct
  source 1..100: mol_type = other RNA
catgggtatggcctctattccgttggccccagcagcttcagtccttactcgtcgatggtcataagttccttatgcacggccttggagagcttcaggggtg

SEQ ID NO: 3140 - RNA, 100 nt, synthetic construct
  source 1..100: mol_type = other RNA
catgggtatggcctcggttcccatggccccagcagcttcagtccttactcgtcgatggtcataagttccttatgcacggccttggagagcttcaggggtg

SEQ ID NO: 3141 - RNA, 100 nt, synthetic construct
  source 1..100: mol_type = other RNA
catgggtatggccagggttaacatggccccagcagcttcagtccttactcgtcgatggtcataagttccttatgcacggccttggagagcttcaggggtg

SEQ ID NO: 3142 - RNA, 100 nt, synthetic construct
  source 1..100: mol_type = other RNA
catgggtatggggaggtaaaacatggccccagcagcttcagtccttactcgtcgatggtcataagttccttatgcacggccttggagagcttcaggggtg

SEQ ID NO: 3143 - RNA, 89 nt, synthetic construct
  source 1..89: mol_type = other RNA
tagacatgggtatggcctctaatttgtaggccccagcagcttcagtcccttactcgtcgtaccagagcacagccagtcgtatgcacggc

SEQ ID NO: 3144 - RNA, 85 nt, synthetic construct
  source 1..85: mol_type = other RNA
tagacatgggtatggggcagtattcccatggccccagcagcttcagtccttactcgtcgatggtcataagttccttatgcacggc

SEQ ID NO: 3145 - RNA, 10 nt, synthetic construct
  source 1..10: mol_type = other RNA
ctacagcatt

SEQ ID NO: 3146 - RNA, 10 nt, synthetic construct
  source 1..10: mol_type = other RNA
tatcccgaat

SEQ ID NO: 3147 - RNA, 10 nt, synthetic construct
  source 1..10: mol_type = other RNA
tacagcattg

SEQ ID NO: 3148 - RNA, 10 nt, synthetic construct
  source 1..10: mol_type = other RNA
aaatcccgat

SEQ ID NO: 3149 - DNA, 26 bp, synthetic construct
  source 1..26: mol_type = other DNA
cagaaaacctgctccaaaaattccac

SEQ ID NO: 3150 - DNA, 25 bp, synthetic construct
  source 1..25: mol_type = other DNA
  misc_difference 25: note = a, g, c, or t
tttttttttttttttttttttttvn

SEQ ID NO: 3151 - DNA, 113 bp, synthetic construct; identical to SEQ ID NO: 149
  source 1..113: mol_type = other DNA

SEQ ID NO: 3152 - DNA, 113 bp, synthetic construct; identical to SEQ ID NO: 150
  source 1..113: mol_type = other DNA

SEQ ID NO: 3153 - DNA, 113 bp, synthetic construct; identical to SEQ ID NO: 146
  source 1..113: mol_type = other DNA

SEQ ID NO: 3154 - DNA, 113 bp, synthetic construct; identical to SEQ ID NO: 148
  source 1..113: mol_type = other DNA

SEQ ID NO: 3155 - DNA, 113 bp, synthetic construct; identical to SEQ ID NO: 147
  source 1..113: mol_type = other DNA

SEQ ID NO: 3156 - DNA, 100 bp, synthetic construct
  source 1..100: mol_type = other DNA
aacttcaggtgcacgaaaccctggtgtgccctctgatgttttttaggggattctaccgctgtgctgggcaatcccgtggtcagcaatcaaacgtatgatg

SEQ ID NO: 3157 - DNA, 100 bp, synthetic construct
  source 1..100: mol_type = other DNA
caggtgcacgaaaccctggtgtgccctctgatgttttttaggggattctaccgctgtgctgggcaatcccgtggtcagcaatcaaacgtatgatggcagc

SEQ ID NO: 3158 - DNA, 100 bp, synthetic construct
  source 1..100: mol_type = other DNA
gcacgaaaccctggtgtgccctctgatgttttttaggggattctaccgctgtgctgggcaatcccgtggtcagcaatcaaacgtatgatggcagcattgg

SEQ ID NO: 3159 - DNA, 100 bp, synthetic construct
  source 1..100: mol_type = other DNA
aaaccctggtgtgccctctgatgttttttaggggattctaccgctgtgctgggcaatcccgtggtcagcaatcaaacgtatgatggcagcattgggatac

SEQ ID NO: 3160 - DNA, 100 bp, synthetic construct
  source 1..100: mol_type = other DNA
ctggtgtgccctctgatgttttttaggggattctaccgctgtgctgggcaatcccgtggtcagcaatcaaacgtatgatggcagcattgggatacagtgt

SEQ ID NO: 3161 - RNA, 98 nt, synthetic construct
  source 1..98: mol_type = other RNA
ctggtgtgccctctgatccaagcatccccattctacagtaggactgagcactgccgagctgggcaatcttgagtcggatggcagcattgggatacagt

SEQ ID NO: 3162 - RNA, 96 nt, synthetic construct
  source 1..96: mol_type = other RNA
gtgccctctgatgtttttatccggcgagtacagcagttcggaggaatcccgaggtcagcaatcctaagtatgatggcagcattgggatacagtgtg

1-126. (canceled)

127. An engineered guide RNA or a polynucleotide encoding the engineered guide RNA, wherein the engineered guide RNA comprises a sequence with complementarity to a sequence of a target RNA, wherein the complementarity is sufficient for the engineered guide RNA to hybridize to the target RNA, thereby forming a guide-target RNA scaffold that is a substrate for an adenosine deaminase acting on RNA (ADAR) enzyme, wherein the guide-target RNA scaffold comprises a micro-footprint and a barbell macro-footprint that each independently comprise a structural feature formed upon hybridization of the sequence of the engineered guide RNA to the sequence of the target RNA; wherein:
(a) the micro-footprint comprises a structural feature comprising an A/C mismatch formed between a target adenosine in the sequence of the target RNA and a cytosine of the engineered guide RNA; and
(b) the barbell macro-footprint comprises structural features:
(i) a first internal loop that is 5′ of the micro-footprint; and
(ii) a second internal loop that is 3′ of the micro-footprint; and wherein the guide-target RNA scaffold that comprises the micro-footprint and the barbell macro-footprint, upon contact with the ADAR enzyme, facilitates increased editing of the adenosine of the A/C mismatch in the sequence of the target RNA by the ADAR enzyme, relative to an otherwise comparable guide-target RNA scaffold lacking the barbell macro-footprint.

128. The engineered guide RNA or the polynucleotide encoding the engineered guide RNA of claim 127, wherein the micro-footprint comprises at least one additional structural feature selected from the group consisting of: a bulge, an internal loop, a mismatch, a wobble base pair, a hairpin, and any combination thereof.

129. The engineered guide RNA or the polynucleotide encoding the engineered guide RNA of claim 127, wherein the first internal loop or the second internal loop of the barbell macro-footprint is a symmetric internal loop.

130. The engineered guide RNA or the polynucleotide encoding the engineered guide RNA of claim 129, wherein the first internal loop and the second internal loop of the barbell macro-footprint are each symmetric internal loops that independently are 5/5, 6/6, 7/7, 8/8, 9/9, 10/10, 11/11, 12/12, 13/13, 14/14, 15/15, 16/16, 17/17, 18/18, 19/19, or 20/20 symmetric internal loops, wherein the first number is the number of nucleotides contributed to the symmetric internal loop from the engineered guide RNA side of the guide-target RNA scaffold and the second number is the number of nucleotides contributed to the symmetric internal loop from the target RNA side of the guide-target RNA scaffold.

131. The engineered guide RNA or the polynucleotide encoding the engineered guide RNA of claim 127, wherein the first internal loop or the second internal loop of the barbell macro-footprint is an asymmetric internal loop.

132. The engineered guide RNA or the polynucleotide encoding the engineered guide RNA of claim 127, wherein the guide-target RNA scaffold that comprises the micro-footprint and the barbell macro-footprint, upon contact with the ADAR enzyme, facilitates decreased editing of an off-target adenosine in the sequence of the target RNA by the ADAR enzyme, relative to an otherwise comparable guide-target RNA scaffold lacking the barbell macro-footprint.

133. The engineered guide RNA or the polynucleotide encoding the engineered guide RNA of claim 132, wherein the first internal loop of the barbell macro-footprint is positioned from about 1 base away from the A/C mismatch to about 30 bases away from the A/C mismatch with respect to a base of the first internal loop that is most proximal to the A/C mismatch.

134. The engineered guide RNA or the polynucleotide encoding the engineered guide RNA of claim 133, wherein the first internal loop of the barbell macro-footprint is positioned 4 bases, 5 bases, 6 bases, 8 bases, 10 bases, 11 bases, 15 bases, 18 bases, or 22 bases away from the A/C mismatch with respect to the base of the first internal loop that is most proximal to the A/C mismatch.

135. The engineered guide RNA or the polynucleotide encoding the engineered guide RNA of claim 127, wherein the second internal loop of the barbell macro-footprint is positioned from about 12 bases away from the A/C mismatch to about 40 bases away from the A/C mismatch with respect to a base of the second internal loop that is most proximal to the A/C mismatch.

136. The engineered guide RNA or the polynucleotide encoding the engineered guide RNA of claim 135, wherein the second internal loop of the barbell macro-footprint is positioned 26 bases, 27 bases, 28 bases, 30 bases, 32 bases, 33 bases, 35 bases, 36 bases, or about 40 bases away from the A/C mismatch with respect to the base of the second internal loop that is most proximal to the A/C mismatch.

137. An engineered guide RNA or a polynucleotide encoding the engineered guide RNA, wherein the engineered guide RNA comprises a sequence with complementarity to a sequence of a target RNA, wherein the complementarity is sufficient for the engineered guide RNA to hybridize to the target RNA, thereby forming a guide-target RNA scaffold that is a substrate for an adenosine deaminase acting on RNA (ADAR) enzyme, wherein the guide-target RNA scaffold comprises a micro-footprint and a barbell macro-footprint; wherein:
(a) the micro-footprint comprises a structural feature formed upon hybridization of the sequence of the engineered guide RNA to the sequence of the target RNA that is selected from the group consisting of: a bulge, an internal loop, a mismatch, a wobble base pair, a hairpin, and any combination thereof, and
(b) the barbell macro-footprint comprises a first internal loop and a second internal loop that are each formed upon hybridization of the sequence of the engineered guide RNA to the sequence of the target RNA, wherein the first internal loop is 5′ of the micro-footprint and the second internal loop is 3′ of the micro-footprint;
wherein the guide-target RNA scaffold that comprises the micro-footprint and the barbell macro-footprint, upon contact with the ADAR enzyme, facilitates increased editing of a target adenosine in the sequence of the target RNA by the ADAR enzyme, relative to an otherwise comparable guide-target RNA scaffold lacking the barbell macro-footprint; and wherein:
(i) the engineered guide RNA is a linear guide RNA;
(ii) the first internal loop or the second internal loop is a 5/5, 6/6, or 7/7 symmetric internal loop;
(iii) at least one of the first internal loop or the second internal loop is not an 8/8 symmetric internal loop; or
(iv) any combination of (i), (ii), and/or (iii).

138. An engineered guide RNA or a polynucleotide encoding the engineered guide RNA, wherein the engineered guide RNA comprises a sequence with complementarity to a sequence of a target RNA, wherein the complementarity is sufficient for the engineered guide RNA to hybridize to the target RNA, thereby forming a guide-target RNA scaffold that is a substrate for an adenosine deaminase acting on RNA (ADAR) enzyme, wherein the guide-target RNA scaffold comprises a micro-footprint and a barbell macro-footprint; wherein:
(a) the micro-footprint comprises a structural feature formed upon hybridization of the sequence of the engineered guide RNA to the sequence of the target RNA that is selected from the group consisting of: a bulge, an internal loop, a mismatch, a wobble base pair, a hairpin, and any combination thereof, and
(b) the barbell macro-footprint comprises a first internal loop and a second internal loop that are each formed upon hybridization of the sequence of the engineered guide RNA to the sequence of the target RNA, wherein the first internal loop is 5′ of the micro-footprint and the second internal loop is 3′ of the micro-footprint;
wherein the target RNA is selected from the group consisting of: ABCA4, APP, CFTR, DMPK, DUX4, GBA, GRN, HEXA, LIPA, LRRK2, MAPT, PINK1, PMP22, SERPINA1, SNCA, SOD1, a fragment of any one of these, and any combination thereof.

139. The engineered guide RNA or the polynucleotide encoding the engineered guide RNA of claim 138, wherein the structural feature of the micro-footprint is the mismatch, and wherein the mismatch is an A/C mismatch formed between a target adenosine in the sequence of the target RNA and a cytosine of the engineered guide RNA.

140. The engineered guide RNA or the polynucleotide encoding the engineered guide RNA of claim 139, wherein the target RNA is ABCA4.

141. The engineered guide RNA or the polynucleotide encoding the engineered guide RNA of claim 140, wherein the first internal loop of the barbell macro-footprint is positioned from about 5 bases away from the A/C mismatch to about 15 bases away from the A/C mismatch with respect to a base of the first internal loop that is most proximal to the A/C mismatch, and wherein the second internal loop of the barbell macro-footprint is positioned from about 12 bases away from the A/C mismatch to about 40 bases away from the A/C mismatch with respect to a base of the second internal loop that is most proximal to the A/C mismatch.

142. The engineered guide RNA or the polynucleotide encoding the engineered guide RNA of claim 140, wherein the engineered guide RNA comprises a polynucleotide sequence with at least 80%, 85%, 90%, 92%, 95%, 97%, or 99% sequence identity to any one of SEQ ID NO: 1-105, 2729-2761, or 2772-2843.

143. The engineered guide RNA or the polynucleotide encoding the engineered guide RNA of claim 139, wherein the target RNA is APP.

144. The engineered guide RNA or the polynucleotide encoding the engineered guide RNA of claim 143, wherein the first internal loop of the barbell macro-footprint is positioned from about 5 bases away from the A/C mismatch to about 20 bases away from the A/C mismatch with respect to the base of the first internal loop that is most proximal to the A/C mismatch; and wherein the second internal loop of the barbell macro-footprint is positioned from about 15 bases away from the A/C mismatch to about 40 bases away from the A/C mismatch with respect to the base of the second internal loop that is most proximal to the A/C mismatch.

145. The engineered guide RNA or the polynucleotide encoding the engineered guide RNA of claim 143, wherein the engineered guide RNA comprises a polynucleotide sequence with at least 80%, 85%, 90%, 92%, 95%, 97%, or 99% sequence identity to any one of SEQ ID NO: 112-114.

146. The engineered guide RNA or the polynucleotide encoding the engineered guide RNA of claim 139, wherein the target RNA is SERPINA1.

147. The engineered guide RNA or the polynucleotide encoding the engineered guide RNA of claim 146, wherein the first internal loop of the barbell macro-footprint is positioned from about 5 bases away from the A/C mismatch to about 20 bases away from the A/C mismatch with respect to the base of the first internal loop that is most proximal to the A/C mismatch, and wherein the second internal loop of the barbell macro-footprint is positioned from about 12 bases away from the A/C mismatch to about 40 bases away from the A/C mismatch with respect to the base of the second internal loop that is most proximal to the A/C mismatch.

148. The engineered guide RNA or the polynucleotide encoding the engineered guide RNA of claim 146, wherein the engineered guide RNA comprises a polynucleotide sequence with at least 80%, 85%, 90%, 92%, 95%, 97%, or 99% sequence identity to any one of SEQ ID NO: 2762-2768 or 3083-3086.

149. The engineered guide RNA or the polynucleotide encoding the engineered guide RNA of claim 139, wherein the target RNA is LRRK2.

150. The engineered guide RNA or the polynucleotide encoding the engineered guide RNA of claim 149, wherein the first internal loop of the barbell macro-footprint is positioned from about 7 bases away from the A/C mismatch to about 30 bases away from the A/C mismatch with respect to the base of the first internal loop that is most proximal to the A/C mismatch; and wherein the second internal loop of the barbell macro-footprint is positioned from about 18 bases away from the A/C mismatch to about 34 bases away from the A/C mismatch with respect to the base of the second internal loop that is most proximal to the A/C mismatch.

151. The engineered guide RNA or the polynucleotide encoding the engineered guide RNA of claim 149, wherein the engineered guide RNA comprises a polynucleotide sequence with at least 80%, 85%, 90%, 92%, 95%, 97%, or 99% sequence identity to any one of SEQ ID NO: 118-167, 2686-2728, 2769-2771, 2844-3078, or 3081-3082.

152. The engineered guide RNA or the polynucleotide encoding the engineered guide RNA of claim 139, wherein the target RNA is SNCA.

153. The engineered guide RNA or the polynucleotide encoding the engineered guide RNA of claim 152, wherein the first internal loop of the barbell macro-footprint is positioned from about 4 bases away from the A/C mismatch to about 18 bases away from the A/C mismatch with respect to the base of the first internal loop that is most proximal to the A/C mismatch; and wherein the second internal loop of the barbell macro-footprint is positioned from about 26 bases away from the A/C mismatch to about 33 bases away from the A/C mismatch with respect to the base of the second internal loop that is most proximal to the A/C mismatch.

154. The engineered guide RNA or the polynucleotide encoding the engineered guide RNA of claim 152, wherein the engineered guide RNA comprises a polynucleotide sequence with at least 80%, 85%, 90%, 92%, 95%, 97%, or 99% sequence identity to any one of SEQ ID NO: 2480-2681.

155. The engineered guide RNA or the polynucleotide encoding the engineered guide RNA of claim 139, wherein the target RNA is MAPT.

156. The engineered guide RNA or the polynucleotide encoding the engineered guide RNA of claim 155, wherein the first internal loop of the barbell macro-footprint is positioned from about 5 bases away from the A/C mismatch to about 18 bases away from the A/C mismatch with respect to the base of the first internal loop that is most proximal to the A/C mismatch; and wherein the second internal loop of the barbell macro-footprint is positioned from about 12 bases away from the A/C mismatch to about 36 bases away from the A/C mismatch with respect to the base of the second internal loop that is most proximal to the A/C mismatch.

157. The engineered guide RNA or the polynucleotide encoding the engineered guide RNA of claim 155, wherein the engineered guide RNA comprises a polynucleotide sequence with at least 80%, 85%, 90%, 92%, 95%, 97%, or 99% sequence identity to any one of SEQ ID NO: 115-117, 1519-2479 or 2682-2685.

158. The engineered guide RNA or the polynucleotide encoding the engineered guide RNA of claim 139, wherein the target RNA is DUX4.

159. The engineered guide RNA or the polynucleotide encoding the engineered guide RNA of claim 158, wherein the first internal loop of the barbell macro-footprint is positioned from about 1 base away from the A/C mismatch to about 22 bases away from the A/C mismatch with respect to the base of the first internal loop that is most proximal to the A/C mismatch; and wherein the second internal loop of the barbell macro-footprint is positioned from about 15 bases away from the A/C mismatch to about 40 bases away from the A/C mismatch with respect to the base of the second internal loop that is most proximal to the A/C mismatch.

160. The engineered guide RNA or the polynucleotide encoding the engineered guide RNA of claim 158, wherein the engineered guide RNA comprises a polynucleotide sequence with at least 80%, 85%, 90%, 92%, 95%, 97%, or 99% sequence identity to any one of SEQ ID NO: 172-1518.

161. A method of treating a disease in a subject in need thereof, the method comprising administering to the subject in need thereof an effective amount of an engineered guide RNA or a polynucleotide encoding the engineered guide RNA, wherein the engineered guide RNA comprises a sequence with complementarity to a sequence of a target RNA, wherein the complementarity is sufficient for the engineered guide RNA to hybridize to the target RNA, thereby forming a guide-target RNA scaffold that is a substrate for an adenosine deaminase acting on RNA (ADAR) enzyme, wherein the guide-target RNA scaffold comprises a micro-footprint and a barbell macro-footprint; wherein:
(a) the micro-footprint comprises a structural feature formed upon hybridization of the sequence of the engineered guide RNA to the sequence of the target RNA that is selected from the group consisting of: a bulge, an internal loop, a mismatch, a wobble base pair, a hairpin, and any combination thereof, and
(b) the barbell macro-footprint comprises a first internal loop and a second internal loop that are each formed upon hybridization of the sequence of the engineered guide RNA to the sequence of the target RNA, wherein the first internal loop is 5′ of the micro-footprint and the second internal loop is 3′ of the micro-footprint; and
wherein the disease is selected from the group consisting of: a macular degeneration, a Stargardt Disease, a Parkinson's disease, an Alzheimer's disease, a facioscapulohumeral muscular dystrophy (FSHD), a tauopathy, a dementia, a liver cirrhosis, an alpha-1 antitrypsin deficiency (AAT deficiency), and any combination thereof.
